(19) United States
(12) Patent Application Publication
(10) Pub. No.: US 2012/0034228 A1
(43) Pub. Date: Feb. 9, 2012

(54) CROSS-SPECIES-SPECIFIC PSCAxCD3, CD19xCD3, C-METxCD3, ENDOSIALINxCD3, EPCAMxCD3, IGF-1RxCD3 OR FAPALPHAxCD3 BISPECIFIC SINGLE CHAIN ANTIBODY

(75) Inventors: Peter Kufer, Munich (DE); Tobias Raum, Munich (DE); Roman Kischel, Munich (DE); Ralf Lutterbüse, Munich (DE); Patrick Hoffmann, Munich (DE); Doris Rau, Munich (DE); Matthias Klinger, Munich (DE); Susanne Mangold, Munich (DE); Claudia Blümel, Munich (DE)

(73) Assignee: Micromet AG

(21) Appl. No.: 13/122,242

(22) PCT Filed: Oct. 1, 2009
(86) PCT No.: PCT/EP2009/062792

§ 371 Date: Jul. 14, 2011

Related U.S. Application Data
(60) Provisional application No. 61/101,850, filed on Oct. 1, 2008.
(60) Provisional application No. 61/101,853, filed on Oct. 1, 2008.
(60) Provisional application No. 61/101,846, filed on Oct. 1, 2008.
(60) Provisional application No. 61/101,844, filed on Oct. 1, 2008.
(60) Provisional application No. 61/101,927, filed on Oct. 1, 2008.
(60) Provisional application No. 61/101,921, filed on Oct. 1, 2008.
(60) Provisional application No. 61/101,933, filed on Oct. 1, 2008.

(51) Int. Cl. A61K 39/395; C12N 15/62; C12N 15/63; C12P 21/02; A61P 35/02; C12N 1/19; C12N 5/10; C12N 1/15; A61P 35/00; C07K 16/46; C12N 1/21

(52) U.S. Cl. 424/135.1; 530/387.3; 536/23.4; 435/320.1; 435/69.6; 435/252.3; 435/252.33; 435/252.31; 435/254.2; 435/419; 435/328; 435/254.11

(57) ABSTRACT

The present invention relates to a bispecific single chain antibody molecule comprising a first binding domain capable of binding to an epitope of human and non-chimpanzee primate CD3 epsilon chain, wherein the epitope is part of an amino acid sequence comprised in the group consisting of SEQ ID NOs. 2, 4, 6, and 8, and a second binding domain capable of binding to an antigen selected from the group consisting of Prostate Stem Cell Antigen (PSCA), B-Lymphocyte antigen CD19 (CD19), hepatocyte growth factor receptor (C-MET), Endosialin, the EGF-like domain 1 of EpCAM, encoded by exon 2, Fibroblast activation protein alpha (FAP alpha) and Insulin-like growth factor I receptor (IGF-IR or IGF-1R). The invention also provides nucleic acids encoding said bispecific single chain antibody molecule as well as vectors and host cells and a process for its production. The invention further relates to pharmaceutical compositions comprising said bispecific single chain antibody molecule and medical uses of said bispecific single chain antibody molecule.

[0001] The present invention relates to a bispecific single chain antibody molecule comprising a first binding domain capable of binding to an epitope of human and non-chimpanzee primate CD3 epsilon chain, wherein the epitope is part of an amino acid sequence comprised in the group consisting of SEQ ID NOs. 2, 4, 6, and 8, and a second binding domain capable of binding to an antigen selected from the group consisting of Prostate Stem Cell Antigen (PSCA), B-Lymphocyte antigen CD19 (CD19), hepatocyte growth factor receptor (C-MET), Endosialin, the EGF-like domain 1 of EpCAM, encoded by exon 2, Fibroblast activation protein alpha (FAP alpha) and Insulin-like growth factor I receptor (IGF-IR or IGF-1R). The invention also provides nucleic acids encoding said bispecific single chain antibody molecule as well as vectors and host cells and a process for its production. The invention further relates to pharmaceutical compositions comprising said bispecific single chain antibody molecule and medical uses of said bispecific single chain antibody molecule.

[0002] T cell recognition is mediated by clonotypically distributed alpha beta and gamma delta T cell receptors (TcR) that interact with the peptide-loaded molecules of the peptide MHC (pMHC) (Davis & Bjorkman, Nature 334 (1988), 395-402). The antigen-specific chains of the TcR do not possess signalling domains but instead are coupled to the conserved multisubunit signalling apparatus CD3 (Call, Cell 111 (2002), 967-979, Alarcon, Immunol. Rev. 191 (2003), 38-46, Malissen Immunol. Rev. 191 (2003), 7-27). The mechanism by which TcR ligation is directly communicated to the signalling apparatus remains a fundamental question in T cell biology (Alarcon, loc. cit.; Davis, Cell 110 (2002), 285-287). It seems clear that sustained T cell responses involve coreceptor engagement, TcR oligomerization, and a higher order arrangement of TcR-pMHC complexes in the immunological synapse (Davis & van der Merwe, Curr. Biol. 11 (2001), R289-R291, Davis, Nat. Immunol. 4 (2003), 217-224). However very early TcR signalling occurs in the absence of these events and may involve a ligand-induced conformational change in CD3 epsilon (Alarcon, loc. cit., Davis (2002), loc. cit., Gil, J. Biol. Chem. 276 (2001), 11174-11179, Gil, Cell 109 (2002), 901-912). The epsilon, gamma, delta and zeta subunits of the signalling complex associate with each other to form a CD3 epsilon-gamma heterodimer, a CD3 epsilon-delta heterodimer, and a CD3 zeta-zeta homodimer (Call, loc. cit.). Various studies have revealed that the CD3 molecules are important for the proper cell surface expression of the alpha beta TcR and normal T cell development (Berkhout, J. Biol. Chem. 263 (1988), 8528-8536, Wang, J. Exp. Med. 188 (1998), 1375-1380, Kappes, Curr. Opin. Immunol. 7 (1995), 441-447). The solution structure of the ectodomain fragments of the mouse CD3 epsilon gamma heterodimer showed that the epsilon gamma subunits are both C2-set Ig domains that interact with each other to form an unusual side-to-side dimer configuration (Sun, Cell 105 (2001), 913-923). Although the cysteine-rich stalk appears to play an important role in driving CD3 dimerization (Su, loc. cit., Borroto, J. Biol. Chem. 273 (1998), 12807-12816), interaction by means of the extracellular domains of CD3 epsilon and CD3 gamma is sufficient for assembly of these proteins with TcR beta (Manolios, Eur. J. Immunol. 24 (1994), 84-92, Manolios & Li, Immunol. Cell Biol. 73 (1995), 532-536). Although still controversial, the dominant stoichiometry of the TcR most likely comprises one alpha beta TcR, one CD3 epsilon gamma heterodimer, one CD3 epsilon delta heterodimer and one CD3 zeta zeta homodimer (Call, loc. cit.). Given the central role of the human CD3 epsilon gamma heterodimer in the immune response, the crystal structure of this complex bound to the therapeutic antibody OKT3 has recently been elucidated (Kjer-Nielsen, PNAS 101, (2004), 7675-7680).

[0003] A number of therapeutic strategies modulate T cell immunity by targeting TcR signalling, particularly the anti-human CD3 monoclonal antibodies (mAbs) that are widely used clinically in immunosuppressive regimes. The CD3-specific mouse mAb OKT3 was the first mAb licensed for use in humans (Sgro, Toxicology 105 (1995), 23-29) and is widely used clinically as an immunosuppressive agent in transplantation (Chatenoud, Clin. Transplant 7 (1993), 422-430, Chatenoud, Nat. Rev. Immunol. 3 (2003), 123-132, Kumar, Transplant. Proc. 30 (1998), 1351-1352), type 1 diabetes (Chatenoud (2003), loc. cit.), and psoriasis (Utset, J. Rheumatol. 29 (2002), 1907-1913). Moreover, anti-CD3 mAbs can induce partial T cell signalling and clonal anergy (Smith, J. Exp. Med. 185 (1997), 1413-1422). OKT3 has been described in the literature as a potent T cell mitogen (Van Wauve, J. Immunol. 124 (1980), 2708-18) as well as a potent T cell killer (Wong, Transplantation 50 (1990), 683-9). OKT3 exhibits both of these activities in a time-dependent fashion; following early activation of T cells leading to cytokine release, upon further administration OKT3 later blocks all known T cell functions. It is due to this later blocking of T cell function that OKT3 has found such wide application as an immunosuppressant in therapy regimens for reduction or even abolition of allograft tissue rejection.

[0004] OKT3 reverses allograft tissue rejection most probably by blocking the function of all T cells, which play a major role in acute rejection. OKT3 reacts with and blocks the function of the CD3 complex in the membrane of human T cells, which is associated with the antigen recognition structure of T cells (TCR) and is essential for signal transduction. Which subunit of the TCR/CD3 is bound by OKT3 has been the subject of multiple studies. Though some evidence has pointed to a specificity of OKT3 for the epsilon-subunit of the TCR/CD3 complex (Tunnacliffe, Int. Immunol. 1 (1989), 546-50; Kjer-Nielsen, PNAS 101, (2004), 7675-7680). Further evidence has shown that OKT3 binding of the TCR/CD3 complex requires other subunits of this complex to be present (Salmeron, J. Immunol. 147 (1991), 3047-52).

[0005] Other well known antibodies specific for the CD3 molecule are listed in Tunnacliffe, Int. Immunol. 1 (1989), 546-50. As indicated above, such CD3 specific antibodies are able to induce various T cell responses such as lymphokine production (Von Wussow, J. Immunol. 127 (1981), 1197; Palacious, J. Immunol. 128 (1982), 337), proliferation (Van Wauve, J. Immunol. 124 (1980), 2708-18) and suppressor-T cell induction (Kunicka, in “Lymphocyte Typing II” 1 (1986), 223). That is, depending on the experimental conditions, CD3 specific monoclonal antibody can either inhibit or induce cytotoxicity (Leewenberg, J. Immunol. 134 (1985), 3770; Phillips, J. Immunol. 136 (1986) 1579; Platsoucas, Proc. Natl. Acad. Sci. USA 78 (1981), 4500; Itoh, Cell. Immunol. 108 (1987), 283-96; Mentzer, J. Immunol. 135 (1985), 34; Landegren, J. Exp. Med. 155 (1982), 1579; Choi (2001), Eur. J. Immunol. 31, 94-106; Xu (2000), Cell Immunol. 200, 16-26; Kimball (1995), Transpl. Immunol. 3, 212-221).

[0006] Although many of the CD3 antibodies described in the art have been reported to recognize the CD3 epsilon subunit of the CD3 complex, most of them bind in fact to conformational epitopes and, thus, only recognize CD3 epsilon in the native context of the TCR. Conformational epitopes are characterized by the presence of two or more discrete amino acid residues which are separated in the primary sequence, but come together on the surface of the molecule when the polypeptide folds into the native protein/antigen (Sela, (1969) Science 166, 1365 and Layer, (1990) Cell 61, 553-6). The conformational epitopes bound by CD3 epsilon antibodies described in the art may be separated in two groups. In the major group, said epitopes are being formed by two CD3 subunits, e.g. of the CD3 epsilon chain and the CD3 gamma or CD3 delta chain. For example, it has been found in several studies that the most widely used CD3 epsilon monoclonal antibodies OKT3, WT31, UCHT1, 7D6 and Leu-4 did not bind to cells singly transfected with the CD3-epsilon chain. However, these antibodies stained cells doubly transfected with a combination of CD3 epsilon plus either CD3 gamma or CD3 delta (Tunnacliffe, loc. cit.; Law, Int. Immunol. 14 (2002), 389-400; Salmeron, J. Immunol. 147 (1991), 3047-52; Coulie, Eur. J. Immunol. 21 (1991), 1703-9). In a second smaller group, the conformational epitope is being formed within the CD3 epsilon subunit itself. A member of this group is for instance mAb APA 1/1 which has been raised against denatured CD3 epsilon (Risueno, Blood 106 (2005), 601-8). Taken together, most of the CD3 epsilon antibodies described in the art recognize conformational epitopes located on two or more subunits of CD3. The discrete amino acid residues forming the three-dimensional structure of these epitopes may hereby be located either on the CD3 epsilon subunit itself or on the CD3 epsilon subunit and other CD3 subunits such as CD3 gamma or CD3 delta.

[0007] Another problem with respect to CD3 antibodies is that many CD3 antibodies have been found to be species-specific. Anti-CD3 monoclonal antibodies—as holds true generally for any other monoclonal antibodies—function by way of highly specific recognition of their target molecules. They recognize only a single site, or epitope, on their target CD3 molecule. For example, one of the most widely used and best characterized monoclonal antibodies specific for the CD3 complex is OKT-3. This antibody reacts with chimpanzee CD3 but not with the CD3 homolog of other primates, such as macaques, or with dog CD3 (Sandusky et al., J. Med. Primatol. 15 (1986), 441-451). Similarly, WO2005/118635 or WO2007/033230 describe human monoclonal CD3 epsilon antibodies which react with human CD3 epsilon but not with CD3 epsilon of mouse, rat, rabbit, or non-chimpanzee primates, such as rhesus monkey, cynomolgus monkey or baboon monkey. The anti-CD3 monoclonal antibody UCHT-1 is also reactive with CD3 from chimpanzee but not with CD3 from macaques (own data). On the other hand, there are also examples of monoclonal antibodies, which recognize macaque antigens, but not their human counterparts. One example of this group is monoclonal antibody FN-18 directed to CD3 from macaques (Uda et al., J. Med. Primatol. 30 (2001), 141-147). Interestingly, it has been found that peripheral lymphocytes from about 12% of cynomolgus monkeys lacked reactivity with anti-rhesus monkey CD3 monoclonal antibody (FN-18) due to a polymorphism of the CD3 antigen in macaques. Uda et al. described a substitution of two amino acids in the CD3 sequence of cynomolgus monkeys, which are not reactive with FN-18 antibodies, as compared to CD3 derived from animals, which are reactive with FN-18 antibodies (Uda et al., J Med. Primatol. 32 (2003), 105-10; Uda et al., J Med. Primatol. 33 (2004), 34-7).

[0008] The discriminatory ability, i.e. the species specificity, inherent not only to CD3 monoclonal antibodies (and fragments thereof), but to monoclonal antibodies in general, is a significant impediment to their development as therapeutic agents for the treatment of human diseases. In order to obtain market approval any new candidate medication must pass through rigorous testing. This testing can be subdivided into preclinical and clinical phases: Whereas the latter—further subdivided into the generally known clinical phases I, II and III—is performed in human patients, the former is performed in animals. The aim of pre-clinical testing is to prove that the drug candidate has the desired activity and most importantly is safe. Only when the safety in animals and possible effectiveness of the drug candidate has been established in preclinical testing this drug candidate will be approved for clinical testing in humans by the respective regulatory authority. Drug candidates can be tested for safety in animals in the following three ways, (i) in a relevant species, i.e. a species where the drug candidates can recognize the ortholog antigens, (ii) in a transgenic animal containing the human antigens and (iii) by use of a surrogate for the drug candidate that can bind the ortholog antigens present in the animal. Limitations of transgenic animals are that this technology is typically limited to rodents. Between rodents and man there are significant differences in the physiology and the safety results cannot be easily extrapolated to humans. The limitations of a surrogate for the drug candidate are the different composition of matter compared to the actual drug candidate and often the animals used are rodents with the limitation as discussed above. Therefore, preclinical data generated in rodents are of limited predictive power with respect to the drug candidate. The approach of choice for safety testing is the use of a relevant species, preferably a lower primate. The limitation now of monoclonal antibodies suitable for therapeutic intervention in man described in the art is that the relevant species are higher primates, in particular chimpanzees. Chimpanzees are considered as endangered species and due to their human-like nature, the use of such animals for drug safety testing has been banned in Europe and is highly restricted elsewhere. CD3 has also been successfully used as a target for bispecific single chain antibodies in order to redirect cytotoxic T cells to pathological cells, resulting in the depletion of the diseased cells from the respective organism (WO 99/54440; WO 04/106380). For example, Bargou et al. (Science 321 (2008): 974-7) have recently reported on the clinical activity of a CD19×CD3 bispecific antibody construct called blinatumomab, which has the potential to engage all cytotoxic T cells in human patients for lysis of cancer cells. Doses as low as 0.005 milligrams per square meter per day in non-Hodgkin's lymphoma patients led to an elimination of target cells in blood. Partial and complete tumor regressions were first observed at a dose level of 0.015 milligrams, and all seven patients treated at a dose level of 0.06 milligrams experienced a tumor regression. Blinatumomab also led to clearance of tumor cells from bone marrow and liver. Though this study established clinical proof of concept for the therapeutic potency of the bispecific single chain antibody format in treating blood-cell derived cancer, there is still need for successful concepts for therapies of other cancer types.

[0009] In 2008, an estimated 186,320 men will be newly diagnosed with prostate cancer in the United States and about 28,660 men will die from the disease. The most recent report available on cancer mortality shows that, in 2004, the overall death rate from prostate cancer among American men was 25 per 100,000. In the late 1980s, the widespread adoption of the prostate-specific antigen (PSA) test represented a major improvement in the management of prostate cancer. This test measures the amount of PSA protein in the blood, which is often elevated in patients with prostate cancer. In 1986, the U.S. Food and Drug Administration approved the use of the PSA test to monitor patients with prostate cancer and, in 1994, additionally approved its use as a screening test for this disease. Due to the widespread implementation of PSA testing in the United States, approximately 90 percent of all prostate cancers are currently diagnosed at an early stage, and, consequently, men are surviving longer after diagnosis. However, the results of two ongoing clinical trials, the NCI-sponsored Prostate, Lung, Colorectal, and Ovarian (PLCO) screening trial and the European Study of Screening for Prostate Cancer (ERSPC) will be needed to determine whether PSA screening actually saves lives. Ongoing clinical trials over the past 25 years have investigated the effectiveness of natural and synthetic compounds in the prevention of prostate cancer. For example, the Prostate Cancer Prevention Trial (PCPT), which enrolled nearly 19,000 healthy men, found that finasteride, a drug approved for the treatment of benign prostatic hyperplasia (BPH), which is a noncancerous enlargement of the prostate, reduced the risk of developing prostate cancer by 25 percent. Another trial, the Selenium and Vitamin E Cancer Prevention Trial (SELECT), is studying more than 35,000 men to determine whether daily supplements of selenium and vitamin E can reduce the incidence of prostate cancer in healthy men. Other prostate cancer prevention trials are currently evaluating the protective potential of multivitamins, vitamins C and D, soy, green tea, and lycopene, which is a natural compound found in tomatoes. One study, reported in 2005, showed that specific genes were fused in 60 to 80 percent of the prostate tumors analyzed. This study represents the first observation of non-random gene rearrangements in prostate cancer. This genetic alteration may eventually be used as a biomarker to aid in the diagnosis and, possibly, treatment of this disease. Other studies have shown that genetic variations in a specific region of chromosome 8 can increase a man's risk of developing prostate cancer. These genetic variations account for approximately 25 percent of the prostate cancers that occur in white men. They are the first validated genetic variants that increase the risk of developing prostate cancer and may help scientists better understand the genetic causes of this disease. There is also ongoing research that examines how proteins circulating in a patient's blood can be used to improve the diagnosis of prostate and other cancers. In 2005, scientists identified a group of specific proteins that are produced by a patient's immune system in response to prostate tumors. These proteins, a type of autoantibody, were able to detect the presence of prostate cancer cells in blood specimens with greater than 90 percent accuracy. When used in combination with PSA, these and other blood proteins may eventually be used to reduce the number of false-positive results obtained with PSA testing alone and, therefore, reduce the large number of unnecessary prostate biopsies that are performed each year due to false-positive PSA test results.

[0010] Apart from PSA, several other markers for prostate cancer have been identified, including e.g. the six-transmembrane epithelial antigen of the prostate (STEAP) (Hubert et al., PNAS 96 (1999), 14523-14528), the prostate-specific membrane antigen (PSM/PSMA) (Israeli et al., Cancer Res. 53 (1993), 227-230) and the Prostate stem cell antigen (PSCA) (Reiter et al., Proc. Nat. Acad. Sci. 95: 1735-1740, 1998). Prostate stem cell antigen (PSCA) is a 123 amino acid protein first identified when looking for genes upregulated during cancer progression in the LAPC-4 prostate xenograft model (Reiter et al., loc. cit.). It is a glycosyl phosphatidylinositol-anchored cell-surface protein that belongs to the family of Thy-1/Ly-6 surface antigens. PSCA bears 30% homology to stem cell antigen type 2. Although the function of PSCA is yet to be elucidated, homologues of PSCA have diverse activities, and have themselves been implicated in carcinogenesis. Stem cell antigen type 2 has been shown to prevent apoptosis in immature thymocytes (Glasson and Coverdale, PNAS 91 (1994), 5296-5300). Thy-1 activates T cells by signalling through src tyrosine kinases (Amoui et al., Eur. J. Immunol. 27 (1997), 1881-86). Ly-6 genes have been implicated in tumorigenesis and cell adhesion (Schrijvers et al., Exp. Cell. Res. 196 (1991), 264-69). Initial messenger RNA studies and subsequent monoclonal antibody (mAb) staining have revealed that PSCA is expressed on the cell surface of normal and malignant prostate cells (Reiter et al., loc. cit.; Gu et al., Oncogene 19 (2000), 1288-96; Ross et al., Cancer Res. 62 (2002), 2546-53). In normal prostate, PSCA mRNA has been detected in a subset of basal and secretory cells. In prostate carcinoma, PSCA mRNA expression has been detected in approximately 50-80% of primary and approximately 70% of metastatic cancers (Reiter et al., loc. cit.). Immunohistochemistry has been reported on 112 primary prostate cancers and nine prostate cancers metastatic to bone (Gu et al., loc. cit.). PSCA expression was detected in 94% and overexpressed in 40% of clinically localized prostate cancers. High levels of PSCA protein expression were also detected in nine out of nine prostate cancer bone metastases examined. Outside the prostate, PSCA is detected in the umbrella cell layer of the transitional epithelium, some renal collecting ducts, neuroendocrine cells of the stomach, and placental trophoblasts. Importantly, recent studies have reported an overexpression of PSCA in a large proportion of pancreatic cancers and invasive and non-invasive transitional cell carcinomas (Amara et al., Cancer Res. 61 (2001), 4660-4665; Argani et al., Cancer Res. 61 (2001), 4320-24). Because of its cell surface expression and its overexpression in a substantial proportion of various cancers, PSCA has been discussed as target for treatment strategies in cancer. However, future clinical correlation will be required to validate this possibility.

[0011] The expression of certain CD antigens is highly restricted to specific lineage lymphohematopoietic cells and over the past several years, antibodies directed against lymphoid-specific antigens have been used to develop treatments that were effective either in vitro or in animal models. In this respect CD19 has proved to be a very useful target. CD19 is expressed in the whole B lineage from the pro B cell to the mature B cell, it is not shed, is uniformly expressed on all lymphoma cells, and is absent from stem cells (Haagen, Clin Exp Immunol 90 (1992), 368-75, 14; Uckun, Proc. Natl. Acad. Sci. USA 85 (1988), 8603-7). The CD19 is involved in the development of certain B-cell mediated diseases such as various forms of non-Hodgkin lymphoma, B-cell mediated autoimmune diseases or the depletion of B-cells.

[0012] A further example for a molecule which is involved in the progression and spread of numerous human cancer types is the hepatocyte growth factor receptor MET (C-MET). The MET oncogene, encoding the receptor tyrosin kinase (RTK) for hepatocyte growth factor (HGF) and Scatter Factor (SF), controls genetic programs leading to cell growth, invasion, and protection from apoptosis. Deregulated activation of MET is critical not only for the acquisition of tumorigenic properties but also for the achievement of the invasive phenotype (Trusolino, L. & Comoglio, P. M. (2002) Nat. Rev. Cancer 2, 289-300). The role of MET in human tumors emerged from several experimental approaches and was unequivocally proven by the discovery of MET-activating mutations in inherited forms of carcinomas (Schmidt et al., Nat. Genet. 16 (1997), 68-73; Kim et al., J. Med. Genet. 40 (2003), e97). MET constitutive activation is frequent in sporadic cancers, and several studies have shown that the MET oncogene is overexpressed in tumors of specific histotypes or is activated through autocrine mechanisms (for a list see http://www.vai.org/met/). Besides, the MET gene is amplified in hematogenous metastases of colorectal carcinomas (Di Renzo et al., Clin. Cancer Res. 1 (1995), 147-154). The Scatter Factor (SF) secreted in culture by fibroblasts, that has the ability to induce intercellular dissociation of epithelial cells, and the Hepatocyte Growth Factor (HGF), a potent mitogen for hepatocytes in culture derived from platelets or from blood of patients with acute liver failure, independently identified as Met ligands turned out to be the same molecule. Met and SF/HGF are widely expressed in a variety of tissues. The expression of Met (the receptor) is normally confined to cells of epithelial origin, while the expression of SF/HGF (the ligand) is restricted to cells of mesenchymal origin.

[0013] Met is a transmembrane protein produced as a single-chain precursor. The precursor is proteolytically cleaved at a furin site to produce a highly glycosylated and entirely extracellular α-subunit of 50 kd and a β-subunit of 145 kd with a large extracellular region (involved in binding the ligand), a membrane spanning segment, and an intracellular region (containing the catalytic activity) (Giordano (1989) 339: 155-156). The α and β chains are disulphide linked. The extracellular portion of Met contains a region of homology to semaphorins (Sema domain, which includes the full a chain and the N-terminal part of the 13 chain of Met), a cysteine-rich Met Related Sequence (MRS) followed by glycineproline-rich (G-P) repeats, and four Immunoglobuline-like structures (Birchmeier et al., Nature Rev. 4 (2003), 915-25). The intracellular region of Met contains three regions: (1) a juxtamembrane segment that contains: (a) a serine residue (Ser 985) that, when phosphorylated by protein kinase C or by Ca²⁺ calmodulin-dependent kinases downregulates the receptor kinase activity Gandino et al., J. Biol. Chem. 269 (1994), 1815-20); and (b) a tyrosine (Tyr 1003) that binds the ubiquitin ligase Cbl responsible for Met polyubiquitination, endocytosis and degradation (Peschard et al., Mol. Cell. 8 (2001), 995-1004); (2) the tyrosine kinase domain that, upon receptor activation, undergoes transphosphorylation on Tyr1234 and Tyr1235; (3) the C-terminal region, which comprises two crucial tyrosines (Tyr1349 and Tyr1356) inserted in a degenerate motif that represents a multisubstrate docking site capable of recruiting several downstream adaptors containing Src homology-2 (SH2) domains Met receptor, as most Receptor Tyrosine Kinases (RTKs) use different tyrosines to bind specific signaling molecules. The two tyrosines of the docking sites have been demonstrated to be necessary and sufficient for the signal transduction both in vitro and in vivo (Maina et al., Cell 87 (1996), 531-542; Ponzetto et al., Cell 77 (1994), 261-71).

[0014] Though potent and selective preclinical drug candidates have been developed using C-MET as a tumor target, follow-up clinical trials have to reveal whether these drugs are indeed safe and show therapeutic efficacy in humans. In light of these uncertainties, there is still need for novel therapeutic concepts for cancer.

[0015] Cancer has surpassed heart disease as the top killer of Americans under 85, in 2005. Today, cancer ranks behind cardiovascular diseases as the second leading cause of death in Germany. Unless dramatic breakthroughs are achieved in cancer prevention in the next few years comparable to those achieved for cardiovascular disease, cancer will become the leading cause of death in Germany within 15-20 years. Inhibition of tumor angiogenesis is one of the anticancer strategies which has generated much excitement among clinicians and cancer research scientists in the last few years. In the course of these research efforts, several tumor endothelial markers have been identified. Tumor endothelial markers (TEMs) like Endosialin (=TEM1 or CD248) are overexpressed during tumor angiogenesis (St. Croix et al., Science 289 (2000), 1197-1202). Despite the fact that their functions have not been characterized in detail so far, it is well established that they are strongly expressed on vascular endothelial cells in developing embryos and tumors studies (Carson-Walter et al., Cancer Res. 61: 6649-6655, 2001). Accordingly, Endosialin, a 165-kDa type I transmembrane protein, is expressed on the cell surface of tumor blood vessel endothelium in a broad range of human cancers but not detected in blood vessels or other cell types in many normal tissues. It is a C-type lectin-like molecule of 757 amino acids composed of a signal leader peptide, five globular extracellular domains (including a C-type lectin domain, one domain with similarity to the Sushi/ccp/scr pattern, and three EGF repeats), followed by a mucin like region, a transmembrane segment, and a short cytoplasmic tail (Christian et al., J. Biol. Chem. 276: 7408-7414, 2001). The Endosialin core protein carries abundantly sialylated, O-linked oligosaccharides and is sensitive to O-sialoglycoprotein endopeptidase, placing it in the group of sialomucin-like molecules. The N-terminal 360 amino acids of Endosialin show homology to thrombomodulin, a receptor involved in regulating blood coagulation, and to complement receptor C1qRp. This structural relationship indicates a function for Endosialin as a tumor endothelial receptor. Although Endosialin mRNA is ubiquitously expressed on endothelial cells in normal human and murine somatic tissues, Endosialin protein is largely restricted to the corpus luteum and highly angiogenic tissues such as the granular tissue of healing wounds or tumors (Opaysky et al., J. Biol. Chem. 276 (2001, 38795-38807; Rettig et al., PNAS 89 (1992), 10832-36). Endosialin protein expression is upregulated on tumor endothelial cells of carcinomas (breast, kidney, lung, colorectal, colon, pancreas mesothelioma), sarcomas, and neuroectodermal tumors (melanoma, glioma, neuroblastoma) (Rettig et al., loc. cit.). In addition, Endosialin is expressed at a low level on a subset of tumor stroma fibroblasts (Brady et al., J. Neuropathol. Exp. Neurol. 63 (2004), 1274-83; Opaysky et al., loc. cit.). Because of its restricted normal tissue distribution and abundant expression on tumor endothelial cells of many different types of solid tumors, Endosialin has been discussed as a target for antibody-based antiangiogenic treatment strategies of cancer. However, so far, there are no effective therapeutic approaches using Endosialin as a tumor endothelial target.

[0016] A molecule which is very frequently and highly expressed on the majority of human adenocarcinoma and several squamous cell carcinoma cells is EpCAM (CD326) (Went et al., Br. J. Cancer 94 (20006), 128-135). Recent studies have shown that EpCAM is a signalling molecule that can upregulate nuclear expression of the protooncogene c-Myc and cyclins (Munz et al., Oncogene 23 (2004), 5748-58). When overexpressed in quiescent cells, EpCAM induces cell proliferation, growth factor independence and growth of colonies in soft agar, which are hallmarks of oncogenic proteins. When EpCAM expression is knocked down by small interfering RNA (siRNA) in breast cancer cells, such cells cease to proliferate, migrate and be invasive (Osta et al., Cancer Res. 64 (2004), 5818-24). This oncogenic signalling of EpCAM may explain why EpCAM overexpression correlates with poor overall survival in a number of human malignancies, including breast and ovarian cancer (Spizzo et al., Gynecol. Oncol. 103 (2006), 483-8). EpCAM has already been employed as a target antigen in several antibody-based therapeutic approaches, including a human antibody (Oberneder et al., Eur. J. Cancer 42 (2006), 2530-8) and an EpCAM×CD3 single chain bispecific antibody called MT110. The characteristics of MT110 have recently been described in detail (Brischwein et al., 43 (2006), 1129-43). This antibody is active against a variety of human carcinoma lines expressing the target antigen and is currently being tested in a phase I study for safety and early signs of efficacy.

[0017] More specifically, cancer has surpassed heart disease as the top killer of Americans under 85 in 2005. Today, cancer ranks behind cardiovascular diseases as the second leading cause of death in Germany. Unless dramatic breakthroughs are achieved in cancer prevention in the next few years comparable to those achieved for cardiovascular disease, cancer will become the leading cause of death in Germany within 15-20 years. Among the more than 100 types of different cancers, epithelial cancer is the leading cause of cancer deaths in Germany. In epithelial cancer, invasion and metastasis of malignant epithelial cells into normal tissues is accompanied by adaptive changes in the mesenchyme-derived supporting stroma of the target organs. Altered gene expression in these non-transformed stromal cells has been discussed to provide potential targets for therapy. The cell surface protease fibroblast activation protein alpha (FAP alpha) is one example for such a target of activated tumor fibroblasts. Fibroblast activation protein alpha is an inducible cell surface glycoprotein that has originally been identified in cultured fibroblasts using monoclonal antibody F19. Immunohistochemical studies have shown that FAP alpha is transiently expressed in certain normal fetal mesenchymal tissues but that normal adult tissues as well as malignant epithelial, neural, and hematopoietic cells are generally FAP alpha-negative. However, most of the common types of epithelial cancers contain abundant FAP alpha-reactive stromal fibroblasts. Scanlan et al. (Proc. Nat. Acad. Sci. 91: 5657-5661, 1994) cloned a FAP alpha cDNA from a WI-38 human fibroblast cDNA expression library by immunoselection using antibody F19. The predicted 760-amino acid human FAP alpha protein is a type II integral membrane protein with a large C-terminal extracellular domain, which contains 6 potential N-glycosylation sites, 13 cysteine residues, and 3 segments that correspond to highly conserved catalytic domains of serine proteases; a hydrophobic transmembrane segment; and a short cytoplasmic tail. FAP-alpha shows 48% amino acid identity with dipeptidyl peptidase IV (DPP4) and 30% identity with DPP4-related protein (DPPX). Northern blot analysis detected a 2.8-kb FAP alpha mRNA in fibroblasts. Seprase is a 170-kD integral membrane gelatinase whose expression correlates with the invasiveness of human melanoma and carcinoma cells. Goldstein et al. (Biochim. Biophys. Acta 1361: 11-19, 1997) cloned and characterized the corresponding seprase cDNA. The authors found that seprase and FAP alpha are the same protein and products of the same gene. Pineiro-Sanchez et al. (J. Biol. Chem. 272: 7595-7601, 1997) isolated seprase/FAP alpha protein from the cell membranes and shed vesicles of human melanoma LOX cells. Serine protease inhibitors blocked the gelatinase activity of seprase/FAP alpha, suggesting that seprase/FAP alpha contains a catalytically active serine residue(s). The authors found that seprase/FAP alpha is composed of monomeric, N-glycosylated 97-kD subunits that are proteolytically inactive. They concluded that seprase/FAP alpha is similar to DPP4 in that their proteolytic activities are dependent upon subunit association. Due to its degrading activity of gelatine and heat-denatured type-I and type-IV collagen, a role for seprase/FAP alpha in extracellular matrix remodeling, tumor growth, and metastasis of cancers has been suggested. Moreover, seprase/FAP alpha shows a restricted expression pattern in normal tissues and a uniform expression in the supporting stroma of many malignant tumors. Therefore, seprase/FAP alpha may be used as a target for exploring the concept of tumor stroma targeting for immunotherapy of human epithelial cancer. However, though several clinical trials have been initiated to investigate seprase's/FAP alpha's role as a tumor antigen target, conventional immunotherapy approaches or inhibition of seprase/FAP alpha enzymatic activity so far did not yet result in therapeutic efficacy (see e.g. Welt et al., J. Clin. Oncol. 12:1193-203, 1994; Narra et al., Cancer Biol. Ther. 6, 1691-9, 2007; Henry et al., Clinical Cancer Research 13, 1736-1741, 2007).

[0018] Insulin-like growth factor I receptor (IGF-IR or IGF-1R) is a receptor with tyrosine kinase activity having 70% homology with the insulin receptor IR. IGF-1R is a glycoprotein of molecular weight approximately 350,000. It is a hetero-tetrameric receptor of which each half-linked by disulfide bridges—is composed of an extracellular a-subunit and of a transmembrane [beta]-subunit. IGF-1R binds IGF 1 and IGF 2 with a very high affinity but is equally capable of binding to insulin with an affinity 100 to 1000 times less. Conversely, the 1R binds insulin with a very high affinity although the ICFs only bind to the insulin receptor with a 100 times lower affinity. The tyrosine kinase domain of IGF-1R and of 1R has a very high sequence homology although the zones of weaker homology respectively concern the cysteine-rich region situated on the alpha-subunit and the C-terminal part of the [beta]-subunit. The sequence differences observed in the a-subunit are situated in the binding zone of the ligands and are therefore at the origin of the relative affinities of IGF-1R and of 1R for the IGFs and insulin respectively. The differences in the C-terminal part of the [beta]-subunit result in a divergence in the signalling pathways of the two receptors; IGF-1R mediating mitogenic, differentiation and antiapoptosis effects, while the activation of the IR principally involves effects at the level of the metabolic pathways (Baserga et al., Biochim. Biophys. Acta, 1332: F105-126, 1997; Baserga R., Exp. Cell. Res., 253:1-6, 1999). The cytoplasmic tyrosine kinase proteins are activated by the binding of the ligand to the extracellular domain of the receptor. The activation of the kinases in its turn involves the stimulation of different intra-cellular substrates, including IRS-1, IRS-2, Shc and Grb 10 (Peruzzi F. et al., J. Cancer Res. Clin. Oncol., 125:166-173, 1999). The two major substrates of IGF-IR are IRS and Shc which mediate, by the activation of numerous effectors downstream, the majority of the growth and differentiation effects connected with the attachment of the IGFs to this receptor. The availability of substrates can consequently dictate the final biological effect connected with the activation of the IGF-1R. When IRS-1 predominates, the cells tend to proliferate and to transform. When Shc dominates, the cells tend to differentiate (Valentinis B. et al.; J. Biol. Chem. 274:12423-12430, 1999). It seems that the route principally involved for the effects of protection against apoptosis is the phosphatidyl-inositol 3-kinases (PI 3-kinases) route (Prisco M. et al., Horm. Metab. Res., 31:80-89, 1999; Peruzzi F. et al., J. Cancer Res. Clin. Oncol., 125:166-173, 1999). The role of the IGF system in carcinogenesis has become the subject of intensive research in the last ten years. This interest followed the discovery of the fact that in addition to its mitogenic and antiapoptosis properties, IGF-1R seems to be required for the establishment and the maintenance of a transformed phenotype. In fact, it has been well established that an overexpression or a constitutive activation of IGF-1R leads, in a great variety of cells, to a growth of the cells independent of the support in media devoid of fetal calf serum, and to the formation of tumors in nude mice. This in itself is not a unique property since a great variety of products of overexpressed genes can transform cells, including a good number of receptors of growth factors. However, the crucial discovery which has clearly demonstrated the major role played by, IGF-1R in the transformation has been the demonstration that the R-cells, in which the gene coding for IGF-1R has been inactivated, are totally refractory to transformation by different agents which are usually capable of transforming the cells, such as the E5 protein of bovine papilloma virus, an overexpression of EGFR or of PDGFR, the T antigen of SV 40, activated ras or the combination of these two last factors (Sell C. et al., Proc. Natl. Acad. Sci., USA, 90: 11217-11221, 1993; Sell C. et al., Mol. Cell. Biol., 14:3604-3612, 1994; Morrione A. J., Virol., 69:5300-5303, 1995; Coppola D. et al., Mol. Cell. Biol., 14:458a-4595, 1994; DeAngelis T et al., J. Cell. Physiol., 164:214-221, 1995). IGF-1R is expressed in a great variety of tumors and of tumor lines and the IGFs amplify the tumor growth via their attachment to IGF-1R. Other arguments in favor of the role of IGF-IR in carcinogenesis come from studies using murine monoclonal antibodies directed against the receptor or using negative dominants of IGF-IR. In effect, murine monoclonal antibodies directed against IGF-1R inhibit the proliferation of numerous cell lines in culture and the growth of tumor cells in vivo (Arteaga C. et al., Cancer Res., 49:6237-6241, 1989 Li et al., Biochem. Biophys. Res. Com., 196:92-98, 1993; Zia F et al., J. Cell. Biol., 24:269-275, 1996; Scotlandi K et al., Cancer Res., 58:4127-4131, 1998). It has likewise been shown in the works of Jiang et al. (Oncogene, 18:6071-6077, 1999) that a negative dominant of IGF-1R is capable of inhibiting tumor proliferation.

[0019] Though there has been put much effort in identifying novel targets for therapeutic approaches for cancer, cancer is yet one of the most frequently diagnosed diseases. In light of this, there is still need for effective treatments for cancer.

[0020] The present invention provides for a bispecific single chain antibody molecule comprising a first binding domain capable of binding to an epitope of human and non-chimpanzee primate CD3_{ε} (epsilon) chain, wherein the epitope is part of an amino acid sequence comprised in the group consisting of SEQ ID NOs. 2, 4, 6, and 8; and a second binding domain capable of binding to an antigen selected from the group consisting of Prostate stem cell antigen (PSCA), B-Lymphocyte antigen CD19 (CD19), hepatocyte growth factor receptor (C-MET), Endosialin, the EGF-like domain 1 of EpCAM, encoded by exon 2, Fibroblast Activation Protein Alpha (FAP alpha) and Insulin-like growth factor I receptor (IGF-IR or IGF-1R).

[0021] Though T cell-engaging bispecific single chain antibodies described in the art have great therapeutic potential for the treatment of malignant diseases, most of these bispecific molecules are limited in that they are species specific and recognize only human antigen, and—due to genetic similarity—likely the chimpanzee counterpart. The advantage of the present invention is the provision of a bispecific single chain antibody comprising a binding domain exhibiting cross-species specificity to human and non-chimpanzee primate of the CD3 epsilon chain.

[0022] In the present invention, an N-terminal 1-27 amino acid residue polypeptide fragment of the extracellular domain of CD3 epsilon was surprisingly identified which—in contrast to all other known epitopes of CD3 epsilon described in the art—maintains its three-dimensional structural integrity when taken out of its native environment in the CD3 complex (and optionally fused to a heterologous amino acid sequence such as EpCAM or an immunoglobulin Fc part).

[0023] The present invention, therefore, provides for a bispecific single chain antibody molecule comprising a first binding domain capable of binding to an epitope of an N-terminal 1-27 amino acid residue polypeptide fragment of the extracellular domain of CD3 epsilon (which CD3 epsilon is, for example, taken out of its native environment and/or comprised by (presented on the surface of) a T-cell) of human and at least one non-chimpanzee primate CD3 epsilon chain, wherein the epitope is part of an amino acid sequence comprised in the group consisting of SEQ ID NOs. 2, 4, 6, and 8; and a second binding domain capable of binding to prostate-specific membrane antigen (PSMA). Preferred non-chimpanzee primates are mentioned herein elsewhere. At least one (or a selection thereof or all) primate(s) selected from Callithrix jacchus; Saguinus oedipus, Saimiri sciureus, and Macaca fascicularis (either SEQ ID 2225 or 2226 or both), is (are) particularly preferred. Macaca mulatta, also known as Rhesus Monkey is also envisaged as another preferred primate. It is thus envisaged that antibodies of the invention bind to (are capable of binding to) the context independent epitope of an N-terminal 1-27 amino acid residue polypeptide fragment of the extracellular domain of CD3 epsilon of human and Callithrix jacchus, Saguinus oedipus, Saimiri sciureus, and Macaca fascicularis (either SEQ ID 2225 or 2226 or both), and optionally also to Macaca mulatta. A bispecific single chain antibody molecule comprising a first binding domain as defined herein can be obtained (is obtainable by) or can be manufactured in accordance with the protocol set out in the appended Examples (in particular Example 2). To this end, it is envisaged to (a) immunize mice with an N-terminal 1-27 amino acid residue polypeptide fragment of the extracellular domain of CD3 epsilon of human and/or Saimiri sciureus; (b) generation of an immune murine antibody scFv library; (c) identification of CD3 epsilon specific binders by testing the capability to bind to at least SEQ ID NOs. 2, 4, 6, and 8.

[0024] The context-independence of the CD3 epitope provided in this invention corresponds to the first 27 N-terminal amino acids of CD3 epsilon or functional fragments of this 27 amino acid stretch. The phrase “context-independent,” as used herein in relation to the CD3 epitope means that binding of the herein described inventive binding molecules/antibody molecules does not lead to a change or modification of the conformation, sequence, or structure surrounding the antigenic determinant or epitope. In contrast, the CD3 epitope recognized by a conventional CD3 binding molecule (e.g. as disclosed in WO 99/54440 or WO 04/106380) is localized on the CD3 epsilon chain C-terminally to the N-terminal 1-27 amino acids of the context-independent epitope, where it only takes the correct conformation if it is embedded within the rest of the epsilon chain and held in the right sterical position by heterodimerization of the epsilon chain with either the CD3 gamma or delta chain. Anti-CD3 binding molecules/domains as part of a bispecific single chain antibody molecule as provided herein and generated (and directed) against a context-independent CD3 epitope provide for a surprising clinical improvement with regard to T cell redistribution and, thus, a more favourable safety profile. Without being bound by theory, since the CD3 epitope is context-independent, forming an autonomous selfsufficient subdomain without much influence on the rest of the CD3 complex, the CD3 binding molecules/domains provided herein induce less allosteric changes in CD3 conformation than the conventional CD3 binding molecules, which recognize context-dependent CD3 epitopes (e.g. as disclosed in WO 99/54440 or WO 04/106380).

[0025] The context-independence of the CD3 epitope which is recognized by the CD3 binding domain of the bispecific single chain antibody of the invention (PSCA×CD3, CD19×CD3, C-MET×CD3. Endosialin×CD3, EpCAM×CD3, IGF-1R×CD3 or FAPα×CD3) is associated with less or no T cell redistribution (T cell redistribution equates with an initial episode of drop and subsequent recovery of absolute T cell counts) during the starting phase of treatment with said bispecific single chain antibodies of the invention. This results in a better safety profile of the bispecific single chain antibodies of the invention compared to conventional CD3 binding molecules known in the art, which recognize context-dependent CD3 epitopes. Particularly, because T cell redistribution during the starting phase of treatment with CD3 binding molecules is a major risk factor for adverse events, like CNS adverse events, the bispecific single chain antibodies of the invention has a substantial safety advantage over the CD3 binding molecules known in the art by recognizing a context-independent rather than a context-dependent CD3 epitope. Patients with such CNS adverse events related to T cell redistribution during the starting phase of treatment with conventional CD3 binding molecules usually suffer from confusion and disorientation, in some cases also from urinary incontinence. Confusion is a change in mental status in which the patient is not able to think with his or her usual level of clarity. The patient usually has difficulties to concentrate and thinking is not only blurred and unclear but often significantly slowed down. Patients with CNS adverse events related to T cell redistribution during the starting phase of treatment with conventional CD3 binding molecules may also suffer from loss of memory. Frequently, the confusion leads to the loss of ability to recognize people, places, time or dates. Feelings of disorientation are common in confusion, and the decision-making ability is impaired. CNS adverse events related to T cell redistribution during the starting phase of treatment with conventional CD3 binding molecules may further comprise blurred speech and/or word finding difficulties. This disorder may impair both, the expression and understanding of language as well as reading and writing. Besides urinary incontinence, vertigo and dizziness may also accompany CNS adverse events related to T cell redistribution during the starting phase of treatment with conventional CD3 binding molecules in some patients.

[0026] The maintenance of the three-dimensional structure within the mentioned 27 amino acid N-terminal polypeptide fragment of CD3 epsilon can be used for the generation of, preferably human, binding domains which are capable of binding to the N-terminal CD3 epsilon polypeptide fragment in vitro and to the native (CD3 epsilon subunit of the) CD3 complex on T cells in vivo with the same binding affinity. These data strongly indicate that the N-terminal fragment as described herein forms a tertiary conformation, which is similar to its structure normally existing in vivo. A very sensitive test for the importance of the structural integrity of the amino acids 1-27 of the N-terminal polypeptide fragment of CD3 epsilon was performed. Individual amino acids of amino acids 1-27 of the N-terminal polypeptide fragment of CD3 epsilon were changed to alanine (alanine scanning) to test the sensitivity of the amino acids 1-27 of the N-terminal polypeptide fragment of CD3 epsilon for minor disruptions. The CD3 binding domains as part of the bispecific single chain antibodies of the invention were used to test for binding to the alanine-mutants of amino acids 1-27 of the N-terminal polypeptide fragment of CD3 epsilon (see appended Example 5). Individual exchanges of the first five amino acid residues at the very N-terminal end of the fragment and two of the amino acids at positions 23 and 25 of the amino acids 1-27 of the N-terminal polypeptide fragment of CD3 epsilon were critical for binding of the antibody molecules. The substitution of amino acid residues in the region of position 1-5 comprising the residues Q (Glutamine at position 1), D (Aspartic acid at position 2), G (Glycine at position 3), N (Asparagine at position 4), and E (Glutamic acid at position 5) to Alanine abolished binding of the, preferably human, bispecific single chain antibodies of the invention to said fragment. While, for at least some of the, preferably human bispecific single chain antibodies of the invention, two amino acid residues at the C-terminus of the mentioned fragment T (Threonine at position 23) and I (Isoleucine at position 25) reduced the binding energy to the, preferably human, bispecific single chain antibodies of the invention.

[0027] Unexpectedly, it has been found that the thus isolated, preferably human, bispecific single chain antibodies of the invention not only recognize the human N-terminal fragment of CD3 epsilon, but also the corresponding homologous fragments of CD3 epsilon of various primates, including New-World Monkeys (Marmoset, Callithrix jacchus; Saguinus oedipus; Saimiri sciureus) and Old-World Monkeys (Macaca fascicularis, also known as Cynomolgus Monkey; or Macaca mulatta, also known as Rhesus Monkey). Thus, multi-primate specificity of the bispecific single chain antibodies of the invention was detected. The following sequence analyses confirmed that human and primates share a highly homologous sequence stretch at the N-terminus of the extracellular domain of CD3 epsilon.

[0028] The amino acid sequence of the aformentioned N-terminal fragments of CD3 epsilon are depicted in SEQ ID No. 2 (human), SEQ ID No. 4 (Callithrix jacchus); SEQ ID No. 6 (Saguinus oedipus); SEQ ID No. 8 (Saimiri sciureus); SEQ ID No. 2225 QDGNEEMGSITQTPYQVSISGTTILTC or SEQ ID No. 2226 QDGNEEMGSITQTPYQVSISGTTVILT (Macaca fascicularis, also known as Cynomolgus Monkey), and SEQ ID No. 2227 QDGNEEMGSITQTPYHVSISGTTVILT (Macaca mulatta, also known as Rhesus Monkey).

[0029] In one embodiment of the invention the second binding domain of the PSCA×CD3 bispecific single chain antibody of the invention binds to the Prostate stem cell antigen (PSCA). In alternative embodiments the second binding domain binds to CD19, C-MET, Endosialin (CD248), EpCAM, FAPα or IGF-1R. As shown in the following examples, the second binding domain of the EpCAM×CD3 bispecific single chain antibody of the invention binds to amino acid residues 26 to 61 of the EGF-like domain 1 of EpCAM which is encoded by Exon 2 of the EpCAM gene. Said amino acid residues 26 to 61 of the EGF-like domain 1 of human EpCAM are shown in SEQ ID NO. 571. Thus, the EpCAM-directed bispecific single chain molecules of this invention form a unique own class of EpCAM-binding molecules, that is clearly differentiated from EpCAM-binding molecules based on the EpCAM-binder HD69 described earlier. Said EpCAM-binder HD69 bind to a different epitope (i.e. an epitope not localized in the EGF-like domain 1 of human EpCAM).

[0030] Preferably, the second binding domain of the PSCA×CD3 (respectively CD19×CD3, C-MET×CD3, Endosialin×CD3, EpCAM×CD3, IGF-1R×CD3 or FAPα×CD3) bispecific single chain antibody binds to the human PSCA (respectively CD19, C-MET, Endosialin, EpCAM, IGF-1R or FAPα) or a non-chimpanzee primate PSCA (respectively CD19, C-MET, Endosialin, EpCAM, IGF-1R or FAPα); more preferred it binds to the human PSCA (respectively CD19, C-MET, Endosialin, EpCAM, IGF-1R or FAPα) and a non-chimpanzee primate PSCA (respectively CD19, C-MET, Endosialin, EpCAM, IGF-1R or FAPα) and therefore is cross-species specific; even more preferred to the human PSCA (respectively CD19, C-MET, Endosialin, EpCAM, IGF-1R or FAPα) and the macaque PSCA (respectively CD19, C-MET, Endosialin, EpCAM, IGF-1R or FAPα) (and therefore is cross-species specific as well). Particularly preferred, the macaque PSCA (respectively CD19, C-MET, Endosialin, EpCAM, IGF-1R or FAPα) is the Cynomolgus monkey PSCA (respectively CD19, C-MET, Endosialin, EpCAM, IGF-1R or FAPα) and/or the Rhesus monkey PSCA (respectively CD19, C-MET, Endosialin, EpCAM, IGF-1R or FAPα). It is to be understood, that the second binding domain of the EpCAM×CD3 bispecific single chain antibody of the invention preferably binds to the EGF-like domain 1 of the non-chimpanzee primate EpCAM which is encoded by Exon 2 of the non-chimpanzee primate EpCAM gene. As indicated above, the non-chimpanzee primate EpCAM is preferably a macaque EpCAM, more preferably the Cynomolgus monkey EpCAM and/or the Rhesus monkey EpCAM.

[0031] However, it is not excluded from the scope of the present invention, that the second binding domain may also bind to PSCA (respectively CD19, C-MET, Endosialin, EpCAM, IGF-1R or FAPα) homologs of other species, such as to the chimpanzee PSCA (respectively CD19, C-MET, Endosialin, EpCAM, IGF-1R or FAPα) or the PSCA (respectively CD19, C-MET, Endosialin, EpCAM, IGF-1R or FAPα) homolog in rodents.

[0032] It will be understood that in a preferred embodiment, the cross-species specificity of the first and second binding domain of the antibodies of the invention is identical.

[0033] Prostate cancer is the second most cancer in men. For 2008, it is estimated that 186,320 men will be newly diagnosed with prostate cancer in the United States and about 28,660 men will die from the disease (see e.g. http://www.cancer.gov/cancertopics/types/prostate). Prostate cancer risk is strongly related to age: very few cases are registered in men under 50 and three-quarters of cases occur in men over 65 years. The largest number of cases is diagnosed in those aged 70-74. Currently, the growth rate of the older population is significantly higher than that of the total population. By 2025-2030, projections indicate that the population over 60 will be growing 3.5 times as rapidly as the total population. The proportion of older persons is projected to more than double worldwide over the next half century, which means that a further increase in incidence of diagnosed prostate cancer has to be expected. However, PSCA is not only a prostate cancer target. Rather, overexpression of PSCA has also been found in bladder cancer (Amara et al., Cancer Res 61 (2001): 4660-4665) and in pancreatic cancer (Argani et al., Cancer Res 61 (2001): 4320-4324). In light of the above, the PSCA×CD3 bispecific single chain antibody of the invention provides an advantageous tool in order to kill PSCA-expressing cancer cells of, including, but not limited to, prostate cancer, bladder cancer or pancreatic cancer in human. As shown in the following Examples, the cytotoxic activity of the PSCA×CD3 bispecific single chain antibody of the invention is higher than the cytotoxic activity of antibodies described in the art.

[0034] Advantageously, the present invention provides also PSCA×CD3 bispecific single chain antibodies comprising a second binding domain which binds both to the human PSCA and to the macaque PSCA homolog, i.e. the homolog of a non-chimpanzee primate. In a preferred embodiment, the bispecific single chain antibody thus comprises a second binding domain exhibiting cross-species specificity to the human and a non-chimpanzee primate Prostate stem cell antigen (PSCA). In this case, the identical bispecific single chain antibody molecule can be used both for preclinical evaluation of safety, activity and/or pharmacokinetic profile of these binding domains in primates and as drugs in humans. Put in other words, the same molecule can be used in preclinical animal studies as well as in clinical studies in humans. This leads to highly comparable results and a much-increased predictive power of the animal studies compared to species-specific surrogate molecules. Since both the CD3 and the PSCA binding domain of the PSCA×CD3 bispecific single chain antibody of the invention are cross-species specific, i.e. reactive with the human and non-chimpanzee primates, it can be used both for preclinical evaluation of safety, activity and/or pharmacokinetic profile of these binding domains in primates and—in the identical form—as drugs in humans.

[0035] CD19 is a cell surface molecule expressed only by B lymphocytes and follicular dendritic cells of the hematopoietic system. It is the earliest of the B-lineage-restricted antigens to be expressed and is present on most pre-B cells and most non-T-cell acute lymphocytic leukemia cells and B-cell type chronic lymphocytic leukemia cells.

[0036] In a preferred embodiment, the bispecific single chain antibody of the invention comprises a second binding domain exhibiting cross-species specificity to the human and a non-chimpanzee primate CD19. In this case, the identical bispecific single chain antibody molecule can be used both for preclinical evaluation of safety, activity and/or pharmacokinetic profile of these binding domains in primates and as drug in humans. This leads to highly comparable results and a much-increased predictive power of the animal studies compared to species-specific surrogate molecules. Since in this embodiment both the CD3 and the CD19 binding domain of the CD19×CD3 bispecific single chain antibody of the invention are cross-species specific, i.e. reactive with the human and non-chimpanzee primates, it can be used both for preclinical evaluation of safety, activity and/or pharmacokinetic profile of these binding domains in primates and—in the identical form—as drug in humans.

[0037] As described herein above, the MET oncogene, encoding the receptor tyrosin kinase (RTK) for hepatocyte growth factor (HGF), and Scatter Factor (SF), controls genetic programs leading to cell growth, invasion, and protection from apoptosis. As shown in the following Examples, the C-MET×CD3 bispecific single chain antibody of the invention thus provides an advantageous tool in order to kill C-MET-expressing cancer cells, as exemplified by the human C-MET positive breast cancer cell line MDA-MB-231. The cytotoxic activity of the C-MET×CD3 bispecific single chain antibody of the invention is higher than the cytotoxic activity of antibodies described in the art. Since preferably both the CD3 and the C-MET binding domain of the C-MET×CD3 bispecific single chain antibody of the invention are cross-species specific, i.e. reactive with the human and non-chimpanzee primates' antigens, the C-MET×CD3 bispecific single chain antibody of the invention can be used for preclinical evaluation of safety, activity and/or pharmacokinetic profile of these binding domains in primates and—in the identical form—as drugs in humans.

[0038] Advantageously, the present invention provides in a further alternative embodiment C-MET×CD3 bispecific single chain antibodies comprising a second binding domain which binds both to the human C-MET and to the macaque C-MET homolog, i.e. the homolog of a non-chimpanzee primate. In a preferred embodiment, the bispecific single chain antibody thus comprises a second binding domain exhibiting cross-species specificity to the human and a non-chimpanzee primate C-MET. In this case, the identical bispecific single chain antibody molecule can be used both for preclinical evaluation of safety, activity and/or pharmacokinetic profile of these binding domains in primates and as drugs in humans. Put in other words, the same molecule can be used in preclinical animal studies as well as in clinical studies in humans. This leads to highly comparable results and a much-increased predictive power of the animal studies compared to species-specific surrogate molecules. Since both the CD3 and the C-MET binding domain of the C-MET×CD3 bispecific single chain antibody of the invention are cross-species specific, i.e. reactive with the human and non-chimpanzee primates' antigens, it can be used both for preclinical evaluation of safety, activity and/or pharmacokinetic profile of these binding domains in primates and—in the identical form—as drugs in humans.

[0039] Angiogenesis, i.e. the formation of new capillaries, is essential to a number of important physiological events, both normal and pathological. Recently, increased attention has focused on the purification and characterization of inhibitors of this process, because of the potential therapeutic value of angiogenesis inhibitors in controlling solid tumors. Because of its restricted normal tissue distribution and abundant expression on tumor endothelial cells of many different types of solid tumors, Endosialin can be used as a target for antibody-based anti-angiogenic treatment strategies of cancer. In particular, targeting of tumor endothelial cells instead of the cancer cells has the advantage that target expression on the untransformed endothelial cells of tumor blood vessels is more stable than target expression on the genetically unstable cancer cells. The Endosialin×CD3 bispecific single chain antibody of the invention provides an advantageous tool in order to inhibit the formation of new capillaries in solid tumors which plays a major role in supporting the growth of the tumors. In this novel and inventive therapeutic approach, it is not the tumor cells which are targeted but tumor blood vessels. The Endosialin×CD3 bispecific single chain antibody of the invention recruits cytotoxic T cells to the Endosialin-positive endothelial cells in tumors, including, but not limited to, carcinomas (breast, kidney, lung, colorectal, colon, pancreas mesothelioma), sarcomas, and neuroectodermal tumors (melanoma, glioma, neuroblastoma), resulting in the depletion of the Endosialin-expressing endothelial cells from the tumor. In this way, tumor angegiogenesis is inhibited resulting in tumor regression or even depletion. As shown in the following Examples, the cytotoxic activity of the Endosialin×CD3 bispecific single chain antibody of the invention is higher than the activity of antibodies described in the art. Since the growth of solid neoplasms requires the recruitment of supporting blood vessels, the therapeutic use of the Endosialin×CD3 bispecific single chain antibody of the invention provides a novel and inventive approach for tumor endothelial targeting and killing.

[0040] Advantageously, the present invention provides also Endosialin×CD3 bispecific single chain antibodies comprising a second binding domain which binds both to the human Endosialin and to the macaque Endosialin homolog, i.e. the homolog of a non-chimpanzee primate. In a preferred embodiment, the bispecific single chain antibody thus comprises a second binding domain exhibiting cross-species specificity to the human and a non-chimpanzee primate Endosialin. In this case, the identical bispecific single chain antibody molecule can be used both for preclinical evaluation of safety, activity and/or pharmacokinetic profile of these binding domains in primates and as drug in humans. Put in other words, the same molecule can be used in preclinical animal studies as well as in clinical studies in humans. This leads to highly comparable results and a much-increased predictive power of the animal studies compared to species-specific surrogate molecules. Since both the CD3 and the Endosialin binding domain of the Endosialin×CD3 bispecific single chain antibody of the invention are cross-species specific, i.e. reactive with the human and non-chimpanzee primates, it can be used both for preclinical evaluation of safety, activity and/or pharmacokinetic profile of these binding domains in primates and—in the identical form—as drug in humans.

[0041] EpCAM has recently been found to be expressed on so called “cancer stem cells” (Dalerba et al., PNAS 104 (2007), 10158-63; Dalerba et al., Ann. Rev. Med. 58 (2007), 267-84). In light of this, the EpCAM×CD3 bispecific single chain antibody of the invention not only provides an advantageous tool in order to kill EpCAM-expressing cancer cells in epithelial cancer or minimal residual cancer, but may also be useful for the elimination of the presumed culprits responsible for tumor relapse after therapy. In addition, the cytotoxic activity of the EpCAM×CD3 bispecific single chain antibody of the invention is higher than the cytotoxic activity of antibodies described in the art.

[0042] In a preferred embodiment, the bispecific single chain antibody of the invention comprises a second binding domain exhibiting cross-species specificity to the human and a non-chimpanzee primate EpCAM. In this case, the identical bispecific single chain antibody molecule can be used both for preclinical evaluation of safety, activity and/or pharmacokinetic profile of these binding domains in primates and as drug in humans. This leads to highly comparable results and a much-increased predictive power of the animal studies compared to species-specific surrogate molecules. Since in this embodiment both the CD3 and the EpCAM binding domain of the EpCAM×CD3 bispecific single chain antibody of the invention are cross-species specific, i.e. reactive with the human and non-chimpanzee primates, it can be used both for preclinical evaluation of safety, activity and/or pharmacokinetic profile of these binding domains in primates and—in the identical form—as drug in humans.

[0043] The FAPalpha×CD3 bispecific single chain antibody of the invention provides an advantageous tool in order to attack the stroma of solid tumors, such as epithelial tumors, which plays a major role in supporting the growth and neovascularisation of tumors. In this novel and inventive therapeutic approach, it is not the tumor cells which are targeted but activated stromal fibroblasts. Previous study have shown that most of the common types of epithelial cancers, including more than 90% of primary and malignant breast, lung and colorectal carcinomas, contain abundant FAP alpha-reactive stromal fibroblasts (Scanlan et al., PNAS 91 (1994), 5657-5661 and references cited therein). In contrast, normal tissues and benign and premalignant epithelial lesions only rarely contain FAP alpha-positive stromal cells. The FAPalpha×CD3 bispecific single chain antibody of the invention recruits cytotoxic T cells to the FAP alpha-positive activated stromal fibroblasts in primary and malignant epithelial tumors resulting in the depletion of the stromal cells from the tumor. In particular, targeting of tumor stromal cells instead of the cancer cells has the advantage that target expression on the untransformed stromal cells is more stable than target expression on the genetically unstable cancer cells. As shown in the following Examples, the cytotoxic activity of the FAPalpha×CD3 bispecific single chain antibody of the invention is higher than the activity of antibodies described in the art. Since the growth of solid neoplasms requires the recruitment of a supporting stroma, the therapeutic use of the FAPalpha×CD3 bispecific single chain antibody of the invention provides a novel and inventive approach for tumor stromal targeting and killing.

[0044] Advantageously, the present invention provides also FAPalpha×CD3 bispecific single chain antibodies comprising a second binding domain which binds both to the human FAP alpha and to the macaque FAP alpha homolog, i.e. the homolog of a non-chimpanzee primate. In a preferred embodiment, the bispecific single chain antibody thus comprises a second binding domain exhibiting cross-species specificity to the human and a non-chimpanzee primate FAP alpha. In this case, the identical bispecific single chain antibody molecule can be used both for preclinical evaluation of safety, activity and/or pharmacokinetic profile of these binding domains in primates and as drugs in humans. Put in other words, the same molecule can be used in preclinical animal studies as well as in clinical studies in humans. This leads to highly comparable results and a much-increased predictive power of the animal studies compared to species-specific surrogate molecules. Since both the CD3 and the FAP alpha binding domain of the FAPalpha×CD3 bispecific single chain antibody of the invention are cross-species specific, i.e. reactive with the human and non-chimpanzee primates, it can be used both for preclinical evaluation of safety, activity and/or pharmacokinetic profile of these binding domains in primates and—in the identical form—as drugs in humans.

[0045] As described herein above, IGF-1R is a receptor (and, thus a cell surface antigen) with tyrosine kinase activity having 70% homology with the insulin receptor 1R. IGF-1R is expressed in a great variety of tumors and of tumor lines and the IGFs amplify the tumor growth via their attachment to IGF-1R.

[0046] In a preferred embodiment, the bispecific single chain antibody of the invention comprises a second binding domain exhibiting cross-species specificity to the human and a non-chimpanzee primate IGF-1R. In this case, the identical bispecific single chain antibody molecule can be used both for preclinical evaluation of safety, activity and/or pharmacokinetic profile of these binding domains in primates and as drug in humans. This leads to highly comparable results and a much-increased predictive power of the animal studies compared to species-specific surrogate molecules. Since in this embodiment both the CD3 and the IGF-1R binding domain of the IGF-1R×CD3 bispecific single chain antibody of the invention are cross-species specific, i.e. reactive with the human and non-chimpanzee primates, it can be used both for preclinical evaluation of safety, activity and/or pharmacokinetic profile of these binding domains in primates and—in the identical form—as drug in humans.

[0047] It has been found in the present invention that it is possible to generate a, preferably human, PSCA×CD3 (respectively CD19×CD3, C-MET×CD3, Endosialin×CD3, EpCAM×CD3, IGF-1R×CD3 or FAPα×CD3) bispecific single chain antibody wherein the identical molecule can be used in preclinical animal testing, as well as clinical studies and even in therapy in human. This is due to the unexpected identification of the, preferably human, PSCA×CD3 (respectively CD19×CD3, C-MET×CD3, Endosialin×CD3, EpCAM×CD3, IGF-1R×CD3 or FAPα×CD3) bispecific single chain antibody, which, in addition to binding to human CD3 epsilon and PSCA (respectively CD19, C-MET, Endosialin, EpCAM, IGF-1R or FAPα), respectively, (and due to genetic similarity likely to the chimpanzee counterpart), also binds to the homologs of said antigens of non-chimpanzee primates, including New-World Monkeys and Old-World Monkeys. As shown in the following Examples, said preferably human, PSCA×CD3 (respectively CD19×CD3, C-MET×CD3, Endosialin×CD3, EpCAM×CD3, IGF-1R×CD3 or FAPα×CD3) bispecific single chain antibody of the invention can be used as therapeutic agent or drug against various diseases, including, but not limited, to cancer.

[0048] The PSCA×CD3 bispecific single chain antibody is particularly advantageous for the therapy of prostate cancer, bladder cancer or pancreatic cancer.

[0049] Said preferably human CD19×CD3 bispecific single chain antibody of the invention can be used as therapeutic agent against various diseases, including but not limited to cancer, preferably B-cell malignancies, such as non-Hodgkin Lymphoma, B-cell mediated autoimmune diseases or the depletion of B-cells.

[0050] Said preferably human c-MET×CD3 bispecific single chain antibody of the invention can be used as therapeutic agent against various diseases, including but not limited to cancer, preferably carcinoma, sarcoma, glioblastoma/astrocytoma, melanoma, mesothelioma, Wilms tumor or a hematopoietic malignancy such as leukemia, lymphoma or multiple myeloma.

[0051] Said preferably human Endosialin×CD3 bispecific single chain antibody of the invention provides a novel and inventive approach for tumor endothelium targeting and killing for including (but not limited to) carcinomas (breast, kidney, lung, colorectal, colon, pancreas mesothelioma), sarcomas, and neuroectodermal tumors (melanoma, glioma, neuroblastoma). The Endosialin×CD3 bispecific single chain antibody of the invention can deprive solid tumors of their supporting blood vessels, thereby inhibiting angiogenesis and consequently the growth of said neoplasms.

[0052] Said preferably human EpCAM×CD3 bispecific single chain antibody of the invention can be used as therapeutic agent against various diseases, including but not limited to cancer, preferably epithelial cancer.

[0053] Said preferably human IGF-1R×CD3 bispecific single chain antibody of the invention can be used as therapeutic agent against various diseases, including but not limited to cancer, preferably bone or soft tissue cancer (e.g. Ewing sarcoma), breast, liver, lung, head and neck, colorectal, prostate, leiomyosarcoma, cervical and endometrial cancer, ovarian, prostate, and pancreatic cancer. IGF-1R×CD3 bispecific single chain antibody of the invention can be used as therapeutic agent against autoimmune diseases, preferably psoriasis.

[0054] In view of the above, the need to construct a surrogate PSCA×CD3 (respectively CD19×CD3, C-MET×CD3, Endosialin×CD3, EpCAM×CD3, IGF-1R×CD3 or FAPα×CD3) bispecific single chain antibody for testing in a phylogenetic distant (from humans) species disappears. As a result, the identical molecule can be used in animal preclinical testing as is intended to be administered to humans in clinical testing as well as following market approval and therapeutic drug administration. The ability to use the same molecule for preclinical animal testing as in later administration to humans virtually eliminates, or at least greatly reduces, the danger that the data obtained in preclinical animal testing have limited applicability to the human case. In short, obtaining preclinical safety data in animals using the same molecule as will actually be administered to humans does much to ensure the applicability of the data to a human-relevant scenario. In contrast, in conventional approaches using surrogate molecules, said surrogate molecules have to be molecularly adapted to the animal test system used for preclinical safety assessment. Thus, the molecule to be used in human therapy in fact differs in sequence and also likely in structure from the surrogate molecule used in preclinical testing in pharmacokinetic parameters and/or biological activity, with the consequence that data obtained in preclinical animal testing have limited applicability/transferability to the human case. The use of surrogate molecules requires the construction, production, purification and characterization of a completely new construct. This leads to additional development costs and time necessary to obtain that molecule. In sum, surrogates have to be developed separately in addition to the actual drug to be used in human therapy, so that two lines of development for two molecules have to be carried out. Therefore, a major advantage of the, preferably human, PSCA×CD3 (respectively CD19×CD3, C-MET×CD3, Endosialin×CD3, EpCAM×CD3, IGF-1R×CD3 or FAPα×CD3) bispecific single chain antibody of the invention exhibiting cross-species specificity described herein is that the identical molecule can be used for therapeutics in humans and in preclinical animal testing.

[0055] It is preferred that at least one of said first or second binding domains of the bispecific single chain antibody of the invention is CDR-grafted, humanized or human, as set forth in more detail below. Preferably, both the first and second binding domains of the bispecific single chain antibody of the invention are CDR-grafted, humanized or human. For the preferably human, PSCA×CD3 (respectively CD19×CD3, C-MET×CD3, Endosialin×CD3, EpCAM×CD3, IGF-1R×CD3 or FAPα×CD3) bispecific single chain antibody of the invention, the generation of an immune reaction against said binding molecules is excluded to the maximum possible extent upon administration of the molecule to human patients.

[0056] Another major advantage of the, preferably human, PSCA×CD3 (respectively CD19×CD3, C-MET×CD3, Endosialin×CD3, EpCAM×CD3, IGF-1R×CD3 or FAPα×CD3) bispecific single chain antibody of the invention is its applicability for preclinical testing in various primates. The behavior of a drug candidate in animals should ideally be indicative of the expected behavior of this drug candidate upon administration to humans. As a result, the data obtained from such preclinical testing should therefore generally have a highly predictive power for the human case. However, as learned from the tragic outcome of the recent Phase I clinical trial on TGN1412 (a CD28 monoclonal antibody), a drug candidate may act differently in a primate species than in humans: Whereas in preclinical testing of said antibody no or only limited adverse effects have been observed in animal studies performed with cynomolgus monkeys, six human patients developed multiple organ failure upon administration of said antibody (Lancet 368 (2006), 2206-7). The results of these dramatic, non-desired negative events suggest that it may not be sufficient to limit preclinical testing to only one (non-chimpanzee primate) species. The fact that the PSCA×CD3 (respectively CD19×CD3, C-MET×CD3, Endosialin×CD3, EpCAM×CD3, IGF-1R×CD3 or FAPα×CD3) bispecific single chain antibody of the invention binds to a series of New-World and Old-World Monkeys may help to overcome the problems faced in the case mentioned above. Accordingly, the present invention provides means and methods for minimizing species differences in effects when drugs for human therapy are being developed and tested.

[0057] With the, preferably human, cross-species specific PSCA×CD3 (respectively CD19×CD3, C-MET×CD3, Endosialin×CD3, EpCAM×CD3, I G F-1R×CD3 or FAPα×CD3) bispecific single chain antibody of the invention it is also no longer necessary to adapt the test animal to the drug candidate intended for administration to humans, such as e.g. the creation of transgenic animals. The, preferably human, PSCA×CD3 (respectively CD19×CD3, C-MET×CD3, Endosialin×CD3, EpCAM×CD3, IGF-1R×CD3 or FAPα×CD3) bispecific single chain antibody of the invention exhibiting cross-species specificity according to the uses and the methods of invention can be directly used for preclinical testing in non-chimpanzee primates, without any genetic manipulation of the animals. As well known to those skilled in the art, approaches in which the test animal is adapted to the drug candidate always bear the risk that the results obtained in the preclinical safety testing are less representative and predictive for humans due to the modification of the animal. For example, in transgenic animals, the proteins encoded by the transgenes are often highly over-expressed. Thus, data obtained for the biological activity of an antibody against this protein antigen may be limited in their predictive value for humans in which the protein is expressed at much lower, more physiological levels.

[0058] A further advantage of the uses of the preferably human PSCA×CD3 (respectively CD19×CD3, C-MET×CD3, Endosialin×CD3, EpCAM×CD3, IGF-1R×CD3 or FAPα×CD3) bispecific single chain antibody of the invention exhibiting cross-species specificity is the fact that chimpanzees as an endangered species are avoided for animal testing. Chimpanzees are the closest relatives to humans and were recently grouped into the family of hominids based on the genome sequencing data (Wildman et al., PNAS 100 (2003), 7181). Therefore, data obtained with chimpanzee is generally considered to be highly predictive for humans. However, due to their status as endangered species, the number of chimpanzees, which can be used for medical experiments, is highly restricted. As stated above, maintenance of chimpanzees for animal testing is therefore both costly and ethically problematic. The uses of the, preferably human, PSCA×CD3 (respectively CD19×CD3, C-MET×CD3, Endosialin×CD3, EpCAM×CD3, IGF-1R×CD3 or FAPα×CD3) bispecific single chain antibody of the invention avoid both ethical objections and financial burden during preclinical testing without prejudicing the quality, i.e. applicability, of the animal testing data obtained. In light of this, the uses of the, preferably human, PSCA×CD3 (respectively CD19×CD3, C-MET×CD3, Endosialin×CD3, EpCAM×CD3, IGF-1R×CD3 or FAPα×CD3) bispecific single chain antibody of the invention provide for a reasonable alternative for studies in chimpanzees.

[0059] A still further advantage of the, preferably human, PSCA×CD3 (respectively CD19×CD3, C-MET×CD3, Endosialin×CD3, EpCAM×CD3, IGF-1R×CD3 or FAPα×CD3) bispecific single chain antibody of the invention is the ability of extracting multiple blood samples when using it as part of animal preclinical testing, for example in the course of pharmacokinetic animal studies. Multiple blood extractions can be much more readily obtained with a non-chimpanzee primate than with lower animals, e.g. a mouse. The extraction of multiple blood samples allows continuous testing of blood parameters for the determination of the biological effects induced by the, preferably human, PSCA×CD3 (respectively CD19×CD3, C-MET×CD3, Endosialin×CD3, EpCAM×CD3, IGF-1R×CD3 or FAPα×CD3) bispecific single chain antibody of the invention. Furthermore, the extraction of multiple blood samples enables the researcher to evaluate the pharmacokinetic profile of the, preferably human, PSCA×CD3 (respectively CD19×CD3, C-MET×CD3, Endosialin×CD3, EpCAM×CD3, IGF-1R×CD3 or FAPα×CD3) bispecific single chain antibody of the invention as defined herein. In addition, potential side effects, which may be induced by said, preferably human, PSCA×CD3 (respectively CD19×CD3, C-MET×CD3, Endosialin×CD3, EpCAM×CD3, IGF-1R×CD3 or FAPα×CD3) bispecific single chain antibody of the invention reflected in blood parameters can be measured in different blood samples extracted during the course of the administration of said antibody. This allows the determination of the potential toxicity profile of the, preferably human, PSCA×CD3 (respectively CD19×CD3, C-MET×CD3, Endosialin×CD3, EpCAM×CD3, IGF-1R×CD3 or FAPα×CD3) bispecific single chain antibody of the invention as defined herein.

[0060] The advantages of the, preferably human, PSCA×CD3 (respectively CD19×CD3, C-MET×CD3, Endosialin×CD3, EpCAM×CD3, IGF-1R×CD3 or FAPα×CD3) bispecific single chain antibody of the invention as defined herein exhibiting cross-species specificity may be briefly summarized as follows:

[0061] First, the, preferably human, PSCA×CD3 (respectively CD19×CD3, C-MET×CD3, Endosialin×CD3, EpCAM×CD3, IGF-1R×CD3 or FAPα×CD3) bispecific single chain antibody of the invention as defined herein used in preclinical testing is the same as the one used in human therapy. Thus, it is no longer necessary to develop two independent molecules, which may differ in their pharmacokinetic properties and biological activity. This is highly advantageous in that e.g. the pharmacokinetic results are more directly transferable and applicable to the human setting than e.g. in conventional surrogate approaches.

[0062] Second, the uses of the, preferably human, PSCA×CD3 (respectively CD19×CD3, C-MET×CD3, Endosialin×CD3, EpCAM×CD3, IGF-1R×CD3 or FAPα×CD3) bispecific single chain antibody of the invention as defined herein for the preparation of therapeutics in human is less cost- and labor-intensive than surrogate approaches. Third, the, preferably human, PSCA×CD3 (respectively CD19×CD3, C-MET×CD3, Endosialin×CD3, EpCAM×CD3, IGF-1R×CD3 or FAPα×CD3) bispecific single chain antibody of the invention as defined herein can be used for preclinical testing not only in one primate species, but in a series of different primate species, thereby limiting the risk of potential species differences between primates and human.

[0063] Fourth, chimpanzee as an endangered species for animal testing can be avoided if desired.

[0064] Fifth, multiple blood samples can be extracted for extensive pharmacokinetic studies.

[0065] Sixth, due to the human origin of the, preferably human, binding molecules according to a preferred embodiment of the invention the generation of an immune reaction against said binding molecules is minimalized when administered to human patients. Induction of an immune response with antibodies specific for a drug candidate derived from a non-human species as e.g. a mouse leading to the development of human-anti-mouse antibodies (HAMAs) against therapeutic molecules of murine origin is excluded.

[0066] Last but not least:
[0067] the therapeutic use of the PSCA×CD3 bispecific single chain antibody of the invention provides a novel and inventive therapeutic approach for cancer, including, but not limited to, prostate cancer, bladder cancer or pancreatic cancer. The following examples clearly demonstrate for each construct the potent recruitment of cytotoxic activity of human and macaque effector cells against cells positive for PSCA.
[0068] the therapeutic use of the CD19×CD3 bispecific single chain antibody of the invention provides a novel and inventive therapeutic approach for cancer, preferably B-cell malignancies, such as non-Hodgkin lymphoma, B-cell mediated autoimmune diseases or the depletion of B-cells. As shown in the following Examples, the cytotoxic activity of the CD19×CD3 bispecific single chain antibody of the invention is higher than the activity of antibodies described in the art.
[0069] the therapeutic use of the C-MET×CD3 bispecific single chain antibody of the invention provides a novel and inventive therapeutic approach for cancer, preferably carcinoma, sarcoma, glioblastoma/astrocytoma, melanoma, mesothelioma, Wilms tumor or a hematopoietic malignancy such as leukemia, lymphoma or multiple myeloma. As shown in the following Examples, the cytotoxic activity of the C-MET×CD3 bispecific single chain antibody of the invention is higher than the activity of antibodies described in the art.
[0070] the therapeutic use of the Endosialin×CD3 bispecific single chain antibody of the invention provides a novel and inventive approach for tumor endothelium targeting and killing for including (but not limited to) carcinomas (breast, kidney, lung, colorectal, colon, pancreas mesothelioma), sarcomas, and neuroectodermal tumors (melanoma, glioma, neuroblastoma). The Endosialin×CD3 bispecific single chain antibody of the invention can deprive solid tumors of their supporting blood vessels, thereby inhibiting angiogenesis and consequently the growth of said neoplasms.
[0071] the therapeutic use of the EpCAM×CD3 bispecific single chain antibody of the invention provides a novel and inventive therapeutic approach for cancer, preferably epithelial cancer and/or a minimal residual cancer. The EpCAM×CD3 bispecific single chain antibody of the invention not only provides an advantageous tool in order to kill EpCAM-expressing cancer cells in cancer, preferably epithelial cancer or a minimal residual cancer, but may also be useful for the elimination of the presumed culprits responsible for tumor relapse after therapy. In addition, the cytotoxic activity of the EpCAM×CD3 bispecific single chain antibody of the invention is higher than the cytotoxic activity of antibodies described in the art.
[0072] the therapeutic use of the FAPalpha×CD3 bispecific single chain antibody of the invention provides a novel and inventive approach for tumor stromal targeting and killing: The FAPalpha×CD3 bispecific single chain antibody of the invention deprives solid tumors, such as epithelial tumors, of their supporting stroma, thereby inhibiting the growth and neovascularisation of solid neoplasms.
[0073] the therapeutic use of the IGF-1R×CD3 bispecific single chain antibody of the invention provides a novel and inventive approach for cancer (preferably bone or soft tissue cancer (e.g. Ewing sarcoma), breast, liver, lung, head and neck, colorectal, prostate, leiomyosarcoma, cervical and endometrial cancer, ovarian, prostate, and pancreatic cancer) or autoimmune diseases (preferably psoriasis).

[0074] As noted herein above, the present invention provides polypeptides, i.e. bispecific single chain antibodies, comprising a first binding domain capable of binding to an epitope of human and non-chimpanzee primate CD3ε chain and a second binding domain capable of binding to PSCA (respectively CD19, C-MET, Endosialin, EpCAM, IGF-1R or FAPα), wherein the second binding domain preferably also binds to PSCA (respectively CD19, C-MET, Endosialin, EpCAM, IGF-1R or FAPα) of a human and a non-chimpanzee primate. The advantage of bispecific single chain antibody molecules as drug candidates fulfilling the requirements of the preferred bispecific single chain antibody of the invention is the use of such molecules in preclinical animal testing as well as in clinical studies and even for therapy in human. In a preferred embodiment of the cross-species specific bispecific single chain antibodies of the invention the second binding domain binding to a cell surface antigen is human. In a cross-species specific bispecific molecule according to the invention the binding domain binding to an epitope of human and non-chimpanzee primate CD3 epsilon chain is located in the order VH-VL or VL-VH at the N-terminus or the C-terminus of the bispecific molecule. Examples for cross-species specific bispecific molecules according to the invention in different arrangements of the VH- and the VL-chain in the first and the second binding domain are described in the appended examples.

[0075] As used herein, a “bispecific single chain antibody” denotes a single polypeptide chain comprising two binding domains. Each binding domain comprises one variable region from an antibody heavy chain (“VH region”), wherein the VH region of the first binding domain specifically binds to the CD3ε molecule, and the VH region of the second binding domain specifically binds to PSCA, CD19, C-MET, Endosialin, EpCAM, IGF-1R or FAPα. The two binding domains are optionally linked to one another by a short polypeptide spacer. A non-limiting example for a polypeptide spacer is Gly-Gly-Gly-Gly-Ser (G-G-G-G-S) and repeats thereof. Each binding domain may additionally comprise one variable region from an antibody light chain (“VL region”), the VH region and VL region within each of the first and second binding domains being linked to one another via a polypeptide linker, for example of the type disclosed and claimed in EP 623679 B1, but in any case long enough to allow the VH region and VL region of the first binding domain and the VH region and VL region of the second binding domain to pair with one another such that, together, they are able to specifically bind to the respective first and second binding domains.

[0076] The term “protein” is well known in the art and describes biological compounds. Proteins comprise one or more amino acid chains (polypeptides), whereby the amino acids are bound among one another via a peptide bond. The term “polypeptide” as used herein describes a group of molecules, which consists of more than 30 amino acids. In accordance with the invention, the group of polypeptides comprises “proteins” as long as the proteins consist of a single polypeptide chain. Also in line with the definition the term “polypeptide” describes fragments of proteins as long as these fragments consist of more than 30 amino acids. Polypeptides may further form multimers such as dimers, trimers and higher oligomers, i.e. consisting of more than one polypeptide molecule. Polypeptide molecules forming such dimers, trimers etc. may be identical or non-identical. The corresponding higher order structures of such multimers are, consequently, termed homo- or heterodimers, homo- or heterotrimers etc. An example for a hereteromultimer is an antibody molecule, which, in its naturally occurring form, consists of two identical light polypeptide chains and two identical heavy polypeptide chains. The terms “polypeptide” and “protein” also refer to naturally modified polypeptides/proteins wherein the modification is effected e.g. by post-translational modifications like glycosylation, acetylation, phosphorylation and the like. Such modifications are well known in the art.

[0077] The term “binding domain” characterizes in connection with the present invention a domain of a polypeptide which specifically binds to/interacts with a given target structure/antigen/epitope. Thus, the binding domain is an “antigen-interaction-site”. The term “antigen-interaction-site” defines, in accordance with the present invention, a motif of a polypeptide, which is able to specifically interact with a specific antigen or a specific group of antigens, e.g. the identical antigen in different species. Said binding/interaction is also understood to define a “specific recognition”. The term “specifically recognizing” means in accordance with this invention that the antibody molecule is capable of specifically interacting with and/or binding to at least two, preferably at least three, more preferably at least four amino acids of an antigen, e.g. the human CD3 antigen as defined herein. Such binding may be exemplified by the specificity of a “lock-and-key-principle”. Thus, specific motifs in the amino acid sequence of the binding domain and the antigen bind to each other as a result of their primary, secondary or tertiary structure as well as the result of secondary modifications of said structure. The specific interaction of the antigen-interaction-site with its specific antigen may result as well in a simple binding of said site to the antigen. Moreover, the specific interaction of the binding domain/antigen-interaction-site with its specific antigen may alternatively result in the initiation of a signal, e.g. due to the induction of a change of the conformation of the antigen, an oligomerization of the antigen, etc. A preferred example of a binding domain in line with the present invention is an antibody. The binding domain may be a monoclonal or polyclonal antibody or derived from a monoclonal or polyclonal antibody.

[0078] The term “antibody” comprises derivatives or functional fragments thereof which still retain the binding specificity. Techniques for the production of antibodies are well known in the art and described, e.g. in Harlow and Lane “Antibodies, A Laboratory Manual”, Cold Spring Harbor Laboratory Press, 1988 and Harlow and Lane “Using Antibodies: A Laboratory Manual” Cold Spring Harbor Laboratory Press, 1999. The term “antibody” also comprises immunoglobulins (Ig's) of different classes (i.e. IgA, IgG, IgM, IgD and IgE) and subclasses (such as IgG1, IgG2 etc.).

[0079] The definition of the term “antibody” also includes embodiments such as chimeric, single chain and humanized antibodies, as well as antibody fragments, like, inter alia, Fab fragments. Antibody fragments or derivatives further comprise F(ab′)₂, Fv, scFv fragments or single domain antibodies, single variable domain antibodies or immunoglobulin single variable domain comprising merely one variable domain, which might be VH or VL, that specifically bind to an antigen or epitope independently of other V regions or domains; see, for example, Harlow and Lane (1988) and (1999), loc. cit. Such immunoglobulin single variable domain encompasses not only an isolated antibody single variable domain polypeptide, but also larger polypeptides that comprise one or more monomers of an antibody single variable domain polypeptide sequence.

[0080] Various procedures are known in the art and may be used for the production of such antibodies and/or fragments. Thus, the (antibody) derivatives can also be produced by peptidomimetics. Further, techniques described for the production of single chain antibodies (see, inter alia, U.S. Pat. No. 4,946,778) can be adapted to produce single chain antibodies specific for elected polypeptide(s). Also, transgenic animals may be used to express humanized antibodies specific for polypeptides and fusion proteins of this invention. For the preparation of monoclonal antibodies, any technique, providing antibodies produced by continuous cell line cultures can be used.

[0081] Examples for such techniques include the hybridoma technique (Köhler and Milstein Nature 256 (1975), 495-497), the trioma technique, the human B-cell hybridoma technique (Kozbor, Immunology Today 4 (1983), 72) and the EBV-hybridoma technique to produce human monoclonal antibodies (Cole et al., Monoclonal Antibodies and Cancer Therapy, Alan R. Liss, Inc. (1985), 77-96). Surface plasmon resonance as employed in the BIAcore system can be used to increase the efficiency of phage antibodies which bind to an epitope of a target polypeptide, such as CD3 epsilon, PSCA, CD19, C-MET, Endosialin, EpCAM, IGF-1R or FAPα (Schier, Human Antibodies Hybridomas 7 (1996), 97-105; Malmborg, J. Immunol. Methods 183 (1995), 7-13). It is also envisaged in the context of this invention that the term “antibody” comprises antibody constructs, which may be expressed in a host as described herein below, e.g. antibody constructs which may be transfected and/or transduced via, inter alia, viruses or plasmid vectors.

[0082] The term “specific interaction” as used in accordance with the present invention means that the binding domain does not or does not significantly cross-react with polypeptides which have similar structure as those bound by the binding domain, and which might be expressed by the same cells as the polypeptide of interest. Cross-reactivity of a panel of binding domains under investigation may be tested, for example, by assessing binding of said panel of binding domains under conventional conditions (see, e.g., Harlow and Lane, Antibodies: A Laboratory Manual, Cold Spring Harbor Laboratory Press, 1988 and Using Antibodies: A Laboratory Manual, Cold Spring Harbor Laboratory Press, 1999). Examples for the specific interaction of a binding domain with a specific antigen comprise the specificity of a ligand for its receptor. Said definition particularly comprises the interaction of ligands, which induce a signal upon binding to its specific receptor. Examples for said interaction, which is also particularly comprised by said definition, is the interaction of an antigenic determinant (epitope) with the binding domain (antigenic binding site) of an antibody.

[0083] The term “cross-species specificity” or “interspecies specificity” as used herein means binding of a binding domain described herein to the same target molecule in humans and non-chimpanzee primates. Thus, “cross-species specificity” or “interspecies specificity” is to be understood as an interspecies reactivity to the same molecule “X” (i.e. the homolog) expressed in different species, but not to a molecule other than “X”. Cross-species specificity of a monoclonal antibody recognizing e.g. human CD3 epsilon, to a non-chimpanzee primate CD3 epsilon, e.g. macaque CD3 epsilon, can be determined, for instance, by FACS analysis. The FACS analysis is carried out in a way that the respective monoclonal antibody is tested for binding to human and non-chimpanzee primate cells, e.g. macaque cells, expressing said human and non-chimpanzee primate CD3 epsilon antigens, respectively. An appropriate assay is shown in the following examples. The above-mentioned subject matter applies mutatis mutandis for the PSCA, CD19, C-MET, Endosialin, EpCAM, IGF-1R and FAPα antigen: Cross-species specificity of a monoclonal antibody recognizing e.g. human PSCA, CD19, C-MET, Endosialin, EpCAM, IGF-1R or FAPα, to a non-chimpanzee primate PSCA, CD19, C-MET, Endosialin, EpCAM, IGF-1R or FAPα, e.g. macaque PSCA, CD19, C-MET, Endosialin, EpCAM, IGF-1R or FAPα, can be determined, for instance, by FACS analysis. The FACS analysis is carried out in a way that the respective monoclonal antibody is tested for binding to human and non-chimpanzee primate cells, e.g. macaque cells, expressing said human and non-chimpanzee primate PSCA, CD19, C-MET, Endosialin, EpCAM, IGF-1R or FAPα antigens, respectively.

[0084] As used herein, CD3 epsilon denotes a molecule expressed as part of the T cell receptor and has the meaning as typically ascribed to it in the prior art. In human, it encompasses in individual or independently combined form all known CD3 subunits, for example CD3 epsilon, CD3 delta, CD3 gamma, CD3 zeta, CD3 alpha and CD3 beta. The non-chimpanzee primate, non-human CD3 antigens as referred to herein are, for example, Macaca fascicularis CD3 and Macaca mulatta CD3. In Macaca fascicularis, it encompasses CD3 epsilon FN-18 negative and CD3 epsilon FN-18 positive, CD3 gamma and CD3 delta. In Macaca mulatta, it encompasses CD3 epsilon, CD3 gamma and CD3 delta. Preferably, said CD3 as used herein is CD3 epsilon.

[0085] The human CD3 epsilon is indicated in GenBank Accession No. NM_{—}000733 and comprises SEQ ID NO. 1. The human CD3 gamma is indicated in GenBank Accession NO. NM_{—}000073. The human CD3 delta is indicated in GenBank Accession No. NM_{—}000732.

[0086] The CD3 epsilon “FN-18 negative” of Macaca fascicularis (i.e. CD3 epsilon not recognized by monoclonal antibody FN-18 due to a polymorphism as set forth above) is indicated in GenBank Accession No. AB073994.

[0087] The CD3 epsilon “FN-18 positive” of Macaca fascicularis (i.e. CD3 epsilon recognized by monoclonal antibody FN-18) is indicated in GenBank Accession No. AB073993. The CD3 gamma of Macaca fascicularis is indicated in GenBank Accession No. AB073992. The CD3 delta of Macaca fascicularis is indicated in GenBank Accession No. AB073991.

[0088] The nucleic acid sequences and amino acid sequences of the respective CD3 epsilon, gamma and delta homologs of Macaca mulatta can be identified and isolated by recombinant techniques described in the art (Sambrook et al. Molecular Cloning: A Laboratory Manual; Cold Spring Harbor Laboratory Press, 3^{rd} edition 2001). This applies mutatis mutandis to the CD3 epsilon, gamma and delta homologs of other non-chimpanzee primates as defined herein. The identification of the amino acid sequence of Callithrix jacchus, Saimiri sciureus and Saguinus oedipus is described in the appended examples. The amino acid sequence of the extracellular domain of the CD3 epsilon of Callithrix jacchus is depicted in SEQ ID NO: 3, the one of Saguinus oedipus is depicted in SEQ ID NO: 5 and the one of Saimiri sciureus is depicted in SEQ ID NO: 7.

[0089] The human PSCA is indicated in GenBank Accession No. NM_{—}005672. The corresponding cDNA and amino acid sequences are shown in SEQ ID NOs. 444 and 443, respectively. The cloning of the PSCA homolog of macaque is demonstrated in the following examples, the corresponding cDNA and amino acid sequences are shown in SEQ ID NOs. 446 and 445, respectively.

[0090] The human CD19 is indicated in GenBank Accession No. NM_{—}001770. On the basis of this sequence information it is possible for the person skilled in the art without any inventive ado to clone (and express) the macaque CD19 molecule. For example, the human CD19 cDNA or a fragment thereof indicated in GenBank Accession No. NM_{—}001770 can be used as a hybridization probe in order to screen a macaque cDNA library (e.g. a cDNA library of Cynomolgus monkey or Rhesus monkey) under appropriate hybridization conditions. Recombinant techniques and screening methods (including hybridization approaches) in molecular biology are described e.g. in Sambrook et al. Molecular Cloning: A Laboratory Manual; Cold Spring Harbor Laboratory Press, 3^{rd} edition 2001.

[0091] The human C-MET is indicated in GenBank Accession No. NM_{—}000245. The corresponding cDNA and amino acid sequences are shown in SEQ ID NOs. 776 and 777, respectively. The cloning of the C-MET homolog of macaque is demonstrated in the following examples, the corresponding cDNA and amino acid sequences are shown in SEQ ID NOs. 788 and 789, respectively.

[0092] The human Endosialin is indicated in GenBank Accession No. NM_{—}020404. The corresponding cDNA and amino acid sequences are shown in SEQ ID NOs. 913 and 914, respectively. The cloning of the Endosialin homolog of macaque is demonstrated in the following examples, the corresponding cDNA and amino acid sequences are shown in SEQ ID NOs. 915 and 916, respectively.

[0093] The human EpCAM is indicated in GenBank Accession No. NM_{—}002354. The corresponding cDNA and amino acid sequences are shown in SEQ ID NOs. 1029 and 1028, respectively. As demonstrated in the following examples, the second binding domain of the EpCAM×CD3 bispecific single chain antibody of the invention binds to an epitope localized in amino acid residues 26 to 61 of the EGF-like domain 1 of EpCAM which is encoded by Exon 2 of the EpCAM gene. Said amino acids residues 26 to 61 of the EGF-like domain 1 of human EpCAM are shown in SEQ ID NO. 1130. On the basis of this sequence information it is possible for the person skilled in the art without any inventive ado to clone (and express) the macaque EpCAM molecule. For example, the human EpCAM cDNA or a fragment thereof indicated in GenBank Accession No. NM_{—}002354 can be used as a hybridization probe in order to screen a macaque cDNA library (e.g. a cDNA library of Cynomolgus monkey or Rhesus monkey) under appropriate hybridization conditions. Recombinant techniques and screening methods (including hybridization approaches) in molecular biology are described e.g. in Sambrook et al. Molecular Cloning: A Laboratory Manual; Cold Spring Harbor Laboratory Press, 3^{rd} edition 2001.

[0094] The human FAP alpha is indicated in GenBank Accession No. NM_{—}004460. The corresponding cDNA and amino acid sequences are shown in SEQ ID NOs. 1149 and 1150, respectively. The cloning of the FAP alpha homolog of macaque is demonstrated in the following examples, the corresponding cDNA and amino acid sequences are shown in SEQ ID NOs. 1151 and 1152, respectively. The human IGF-1R is indicated in GenBank Accession No. NM_{—}000875. The corresponding cDNA and amino acid sequences are shown in SEQ ID NOs. 1988 and 1989, respectively. The coding sequence of macaque IGF-1R as published in GenBank (Accession number XM_{—}001100407). The corresponding cDNA and amino acid sequences are shown in SEQ ID NOs. 1998 and 1999, respectively.

[0095] In line with the above, the term “epitope” defines an antigenic determinant, which is specifically bound/identified by a binding domain as defined herein. The binding domain may specifically bind to/interact with conformational or continuous epitopes, which are unique for the target structure, e.g. the human and non-chimpanzee primate CD3 epsilon chain or the human and non-chimpanzee primate PSCA, CD19, C-MET, Endosialin, EpCAM, IGF-1R or FAPα. A conformational or discontinuous epitope is characterized for polypeptide antigens by the presence of two or more discrete amino acid residues which are separated in the primary sequence, but come together on the surface of the molecule when the polypeptide folds into the native protein/antigen (Sela, (1969) Science 166, 1365 and Layer, (1990) Cell 61, 553-6). The two or more discrete amino acid residues contributing to the epitope are present on separate sections of one or more polypeptide chain(s). These residues come together on the surface of the molecule when the polypeptide chain(s) fold(s) into a three-dimensional structure to constitute the epitope. In contrast, a continuous or linear epitope consists of two or more discrete amino acid residues, which are present in a single linear segment of a polypeptide chain. Within the present invention, a “context-dependent” CD3 epitope refers to the conformation of said epitope. Such a context-dependent epitope, localized on the epsilon chain of CD3, can only develop its correct conformation if it is embedded within the rest of the epsilon chain and held in the right position by heterodimerization of the epsilon chain with either CD3 gamma or delta chain. In contrast, a context-independent CD3 epitope as provided herein refers to an N-terminal 1-27 amino acid residue polypeptide or a functional fragment thereof of CD3 epsilon. This N-terminal 1-27 amino acid residue polypeptide or a functional fragment thereof maintains its three-dimensional structural integrity and correct conformation when taken out of its native environment in the CD3 complex. The context-independency of the N-terminal 1-27 amino acid residue polypeptide or a functional fragment thereof, which is part of the extracellular domain of CD3 epsilon, represents, thus, an epitope which is completely different to the epitopes of CD3 epsilon described in connection with a method for the preparation of human binding molecules in WO 2004/106380. Said method used solely expressed recombinant CD3 epsilon. The conformation of this solely expressed recombinant CD3 epsilon differed from that adopted in its natural form, that is, the form in which the CD3 epsilon subunit of the TCR/CD3 complex exists as part of a noncovalent complex with either the CD3 delta or the CD3-gamma subunit of the TCR/CD3 complex. When such solely expressed recombinant CD3 epsilon protein is used as an antigen for selection of antibodies from an antibody library, antibodies specific for this antigen are identified from the library although such a library does not contain antibodies with specificity for self-antigens/autoantigens. This is due to the fact that solely expressed recombinant CD3 epsilon protein does not exist in vivo; it is not an autoantigen. Consequently, subpopulations of B cells expressing antibodies specific for this protein have not been depleted in vivo; an antibody library constructed from such B cells would contain genetic material for antibodies specific for solely expressed recombinant CD3 epsilon protein. However, since the context-independent N-terminal 1-27 amino acid residue polypeptide or a functional fragment thereof is an epitope, which folds in its native form, binding domains in line with the present invention cannot be identified by methods based on the approach described in WO 2004/106380. Therefore, it could be verified in tests that binding molecules as disclosed in WO 2004/106380 are not capable of binding to the N-terminal 1-27 amino acid residues of the CD3 epsilon chain. Hence, conventional anti-CD3 binding molecules or anti-CD3 antibody molecules (e.g. as disclosed in WO 99/54440) bind CD3 epsilon chain at a position which is more C-terminally located than the context-independent N-terminal 1-27 amino acid residue polypeptide or a functional fragment provided herein. Prior art antibody molecules OKT3 and UCHT-1 have also a specificity for the epsilon-subunit of the TCR/CD3 complex between amino acid residues 35 to 85 and, accordingly, the epitope of these antibodies is also more C-terminally located. In addition, UCHT-1 binds to the CD3 epsilon chain in a region between amino acid residues 43 to 77 (Tunnacliffe, Int. Immunol. 1 (1989), 546-50; Kjer-Nielsen, PNAS101, (2004), 7675-7680; Salmeron, J. Immunol. 147 (1991), 3047-52). Therefore, prior art anti-CD3 molecules do not bind to and are not directed against the herein defined context-independent N-terminal 1-27 amino acid residue epitope (or a functional fragment thereof). In particular, the state of the art fails to provide anti-CD3 molecules which specifically binds to the context-independent N-terminal 1-27 amino acid residue epitope and which are cross-species specific, i.e. bind to human and non-chimpanzee primate CD3 epsilon.

[0096] For the generation of a, preferably human, binding domain comprised in a bispecific single chain antibody molecule of the invention, e.g. monoclonal antibodies binding to both the human and non-chimpanzee primate CD3 epsilon (e.g. macaque CD3 epsilon) or monoclonal antibodies binding to the human and/or non-chimpanzee primate PSCA, respectively CD19, C-MET, Endosialin, EpCAM, IGF-1R or FAPα, can be used.

[0097] As used herein, “human” and “man” refers to the species Homo sapiens. As far as the medical uses of the constructs described herein are concerned, human patients are to be treated with the same molecule.

[0098] It is preferred that at least one of said first or second binding domains of the bispecific single chain antibody of the invention is CDR-grafted, humanized or human. Preferably, both the first and second binding domains of the bispecific single chain antibody of the invention are CDR-grafted, humanized or human.

[0099] The term “human” antibody as used herein is to be understood as meaning that the bispecific single chain antibody as defined herein, comprises (an) amino acid sequence(s) contained in the human germline antibody repertoire. For the purposes of definition herein, said bispecific single chain antibody may therefore be considered human if it consists of such (a) human germline amino acid sequence(s), i.e. if the amino acid sequence(s) of the bispecific single chain antibody in question is (are) identical to (an) expressed human germline amino acid sequence(s). A bispecific single chain antibody as defined herein may also be regarded as human if it consists of (a) sequence(s) that deviate(s) from its (their) closest human germline sequence(s) by no more than would be expected due to the imprint of somatic hypermutation. Additionally, the antibodies of many non-human mammals, for example rodents such as mice and rats, comprise VH CDR3 amino acid sequences which one may expect to exist in the expressed human antibody repertoire as well. Any such sequence(s) of human or non-human origin which may be expected to exist in the expressed human repertoire would also be considered “human” for the purposes of the present invention.

[0100] As used herein, the term “humanized”, “humanization”, “human-like” or grammatically related variants thereof are used interchangeably to refer to a bispecific single chain antibody comprising in at least one of its binding domains at least one complementarity determining region (“CDR”) from a non-human antibody or fragment thereof. Humanization approaches are described for example in WO 91/09968 and U.S. Pat. No. 6,407,213. As non-limiting examples, the term encompasses the case in which a variable region of at least one binding domain comprises a single CDR region, for example the third CDR region of the VH (CDRH3), from another non-human animal, for example a rodent, as well as the case in which a or both variable region/s comprise at each of their respective first, second and third CDRs the CDRs from said non-human animal. In the event that all CDRs of a binding domain of the bispecific single chain antibody have been replaced by their corresponding equivalents from, for example, a rodent, one typically speaks of “CDR-grafting”, and this term is to be understood as being encompassed by the term “humanized” or grammatically related variants thereof as used herein. The term “humanized” or grammatically related variants thereof also encompasses cases in which, in addition to replacement of one or more CDR regions within a VH and/or VL of the first and/or second binding domain further mutation/s (e.g. substitutions) of at least one single amino acid residue/s within the framework (“FR”) regions between the CDRs has/have been effected such that the amino acids at that/those positions correspond/s to the amino acid/s at that/those position/s in the animal from which the CDR regions used for replacement is/are derived. As is known in the art, such individual mutations are often made in the framework regions following CDR-grafting in order to restore the original binding affinity of the non-human antibody used as a CDR-donor for its target molecule. The term “humanized” may further encompass (an) amino acid substitution(s) in the CDR regions from a non-human animal to the amino acid(s) of a corresponding CDR region from a human antibody, in addition to the amino acid substitutions in the framework regions as described above.

[0101] As used herein, the term “homolog” or “homology” is to be understood as follows:

[0102] Homology among proteins and DNA is often concluded on the basis of sequence similarity, especially in bioinformatics. For example, in general, if two or more genes have highly similar DNA sequences, it is likely that they are homologous. But sequence similarity may arise from different ancestors: short sequences may be similar by chance, and sequences may be similar because both were selected to bind to a particular protein, such as a transcription factor. Such sequences are similar but not homologous. Sequence regions that are homologous are also called conserved. This is not to be confused with conservation in amino acid sequences in which the amino acid at a specific position has changed but the physio-chemical properties of the amino acid remain unchanged. Homologous sequences are of two types: orthologous and paralogous. Homologous sequences are orthologous if they were separated by a speciation event: when a species diverges into two separate species, the divergent copies of a single gene in the resulting species are said to be orthologous. Orthologs, or orthologous genes, are genes in different species that are similar to each other because they originated from a common ancestor. The strongest evidence that two similar genes are orthologous is the result of a phylogenetic analysis of the gene lineage. Genes that are found within one clade are orthologs, descended from a common ancestor. Orthologs often, but not always, have the same function. Orthologous sequences provide useful information in taxonomic classification studies of organisms. The pattern of genetic divergence can be used to trace the relatedness of organisms. Two organisms that are very closely related are likely to display very similar DNA sequences between two orthologs. Conversely, an organism that is further removed evolutionarily from another organism is likely to display a greater divergence in the sequence of the orthologs being studied. Homologous sequences are paralogous if they were separated by a gene duplication event: if a gene in an organism is duplicated to occupy two different positions in the same genome, then the two copies are paralogous. A set of sequences that are paralogous are called paralogs of each other. Paralogs typically have the same or similar function, but sometimes do not: due to lack of the original selective pressure upon one copy of the duplicated gene, this copy is free to mutate and acquire new functions. An example can be found in rodents such as rats and mice. Rodents have a pair of paralogous insulin genes, although it is unclear if any divergence in function has occurred. Paralogous genes often belong to the same species, but this is not necessary: for example, the hemoglobin gene of humans and the myoglobin gene of chimpanzees are paralogs. This is a common problem in bioinformatics: when genomes of different species have been sequenced and homologous genes have been found, one can not immediately conclude that these genes have the same or similar function, as they could be paralogs whose function has diverged.

[0103] As used herein, a “non-chimpanzee primate” or “non-chimp primate” or grammatical variants thereof refers to any primate animal (i.e. not human) other than chimpanzee, i.e. other than an animal of belonging to the genus Pan, and including the species Pan paniscus and Pan troglodytes, also known as Anthropopithecus troglodytes or Simia satyrus. It will be understood, however, that it is possible that the antibodies of the invention can also bind with their first and/or second binding domain to the respective epitopes/fragments etc. of said chimpanzees. The intention is merely to avoid animal tests which are carried out with chimpanzees, if desired. It is thus also envisaged that in another embodiment the antibodies of the present invention also bind with their first and/or second binding domain to the respective epitopes of chimpanzees. A “primate”, “primate species”, “primates” or grammatical variants thereof denote/s an order of eutherian mammals divided into the two suborders of prosimians and anthropoids and comprising apes, monkeys and lemurs. Specifically, “primates” as used herein comprises the suborder Strepsirrhini (non-tarsier prosimians), including the infraorder Lemuriformes (itself including the superfamilies Chemogaleoidea and Lemuroidea), the infraorder Chiromyiformes (itself including the family Daubentoniidae) and the infraorder Lorisiformes (itself including the families Lorisidae and Galagidae). “Primates” as used herein also comprises the suborder Haplorrhini, including the infraorder Tarsiiformes (itself including the family Tarsiidae), the infraorder Simiiformes (itself including the Platyrrhini, or New-World monkeys, and the Catarrhini, including the Cercopithecidea, or Old-World Monkeys).

[0104] The non-chimpanzee primate species may be understood within the meaning of the invention to be a lemur, a tarsier, a gibbon, a marmoset (belonging to New-World Monkeys of the family Cebidae) or an Old-World Monkey (belonging to the superfamily Cercopithecoidea).

[0105] As used herein, an “Old-World Monkey” comprises any monkey falling in the superfamily Cercopithecoidea, itself subdivided into the families: the Cercopithecinae, which are mainly African but include the diverse genus of macaques which are Asian and North African; and the Colobinae, which include most of the Asian genera but also the African colobus monkeys.

[0106] Specifically, within the subfamily Cercopithecinae, an advantageous non-chimpanzee primate may be from the Tribe Cercopithecini, within the genus Allenopithecus (Allen's Swamp Monkey, Allenopithecus nigroviridis); within the genus Miopithecus (Angolan Talapoin, Miopithecus talapoin; Gabon Talapoin, Miopithecus ogouensis); within the genus Erythrocebus (Patas Monkey, Erythrocebus patas); within the genus Chlorocebus (Green Monkey, Chlorocebus sabaceus; Grivet, Chlorocebus aethiops; Bale Mountains Vervet, Chlorocebus djamdjamensis; Tantalus Monkey, Chlorocebus tantalus; Vervet Monkey, Chlorocebus pygerythrus; Malbrouck, Chlorocebus cynosuros); or within the genus Cercopithecus (Dryas Monkey or Salongo Monkey, Cercopithecus dryas; Diana Monkey, Cercopithecus diana; Roloway Monkey, Cercopithecus roloway; Greater Spot-nosed Monkey, Cercopithecus nictitans; Blue Monkey, Cercopithecus mitis; Silver Monkey, Cercopithecus doggetti; Golden Monkey, Cercopithecus kandti; Sykes's Monkey, Cercopithecus albogularis; Mona Monkey, Cercopithecus mona; Campbell's Mona Monkey, Cercopithecus campbelli; Lowe's Mona Monkey, Cercopithecus lowei; Crested Mona Monkey, Cercopithecus pogonias; Wolfs Mona Monkey, Cercopithecus wolfi; Dent's Mona Monkey, Cercopithecus denti; Lesser Spot-nosed Monkey, Cercopithecus petaurista; White-throated Guenon, Cercopithecus erythrogaster; Sclater's Guenon, Cercopithecus sclateri; Red-eared Guenon, Cercopithecus erythrotis; Moustached Guenon, Cercopithecus cephus; Red-tailed Monkey, Cercopithecus ascanius; L'Hoest's Monkey, Cercopithecus lhoesti; Preuss's Monkey, Cercopithecus preussi; Sun-tailed Monkey, Cercopithecus solatus; Hamlyn's Monkey or Owl-faced Monkey, Cercopithecus hamlyni; De Brazza's Monkey, Cercopithecus neglectus).

[0107] Alternatively, an advantageous non-chimpanzee primate, also within the subfamily Cercopithecinae but within the Tribe Papionini, may be from within the genus Macaca (Barbary Macaque, Macaca sylvanus; Lion-tailed Macaque, Macaca silenus; Southern Pig-tailed Macaque or Beruk, Macaca nemestrina; Northern Pig-tailed Macaque, Macaca leonina; Pagai Island Macaque or Bokkoi, Macaca pagensis; Siberut Macaque, Macaca siberu; Moor Macaque, Macaca maura; Booted Macaque, Macaca ochreata; Tonkean Macaque, Macaca tonkeana; Heck's Macaque, Macaca hecki; Gorontalo Macaque, Macaca nigriscens; Celebes Crested Macaque or Black “Ape”, Macaca nigra; Cynomolgus monkey or Crab-eating Macaque or Long-tailed Macaque or Kera, Macaca fascicularis; Stump-tailed Macaque or Bear Macaque, Macaca arctoides; Rhesus Macaque, Macaca mulatta; Formosan Rock Macaque, Macaca cyclopis; Japanese Macaque, Macaca fuscata; Toque Macaque, Macaca sinica; Bonnet Macaque, Macaca radiata; Barbary Macaque, Macaca sylvanmus; Assam Macaque, Macaca assamensis; Tibetan Macaque or Milne-Edwards' Macaque, Macaca thibetana; Arunachal Macaque or Munzala, Macaca munzala); within the genus Lophocebus (Gray-cheeked Mangabey, Lophocebus albigena; Lophocebus albigena albigena; Lophocebus albigena osmani; Lophocebus albigena johnstoni; Black Crested Mangabey, Lophocebus aterrimus; Opdenbosch's Mangabey, Lophocebus opdenboschi; Highland Mangabey, Lophocebus kipunji); within the genus Papio (Hamadryas Baboon, Papio hamadryas; Guinea Baboon, Papio papio; Olive Baboon, Papio anubis; Yellow Baboon, Papio cynocephalus; Chacma Baboon, Papio ursinus); within the genus Theropithecus (Gelada, Theropithecus gelada); within the genus Cercocebus (Sooty Mangabey, Cercocebus atys; Cercocebus atys atys; Cercocebus atys lunulatus; Collared Mangabey, Cercocebus torquatus; Agile Mangabey, Cercocebus agilis; Golden-bellied Mangabey, Cercocebus chrysogaster; Tana River Mangabey, Cercocebus galeritus; Sanje Mangabey, Cercocebus sanjei); or within the genus Mandrillus (Mandrill, Mandrillus sphinx; Drill, Mandrillus leucophaeus).

[0108] Most preferred is Macaca fascicularis (also known as Cynomolgus monkey and, therefore, in the Examples named “Cynomolgus”) and Macaca mulatta (rhesus monkey, named “rhesus”).

[0109] Within the subfamily Colobinae, an advantageous non-chimpanzee primate may be from the African group, within the genus Colobus (Black Colobus, Colobus satanas; Angola Colobus, Colobus angolensis; King Colobus, Colobus polykomos; Ursine Colobus, Colobus vellerosus; Mantled Guereza, Colobus guereza); within the genus Piliocolobus (Western Red Colobus, Piliocolobus badius; Piliocolobus badius badius; Piliocolobus badius temminckii; Piliocolobus badius waldronae; Pennant's Colobus, Piliocolobus pennantii; Piliocolobus pennantii pennantii; Piliocolobus pennantii epieni; Piliocolobus pennantii bouvieri; Preuss's Red Colobus, Piliocolobus preussi; Thollon's Red Colobus, Piliocolobus tholloni; Central African Red Colobus, Piliocolobus foai; Piliocolobus foai foal; Piliocolobus foai ellioti; Piliocolobus foai oustaleti; Piliocolobus foai semlikiensis; Piliocolobus foai parmentierorum; Ugandan Red Colobus, Piliocolobus tephrosceles; Uzyngwa Red Colobus, Piliocolobus gordonorum; Zanzibar Red Colobus, Piliocolobus kirkii; Tana River Red Colobus, Piliocolobus rufomitratus); or within the genus Procolobus (Olive Colobus, Procolobus verus).

[0110] Within the subfamily Colobinae, an advantageous non-chimpanzee primate may alternatively be from the Langur (leaf monkey) group, within the genus Semnopithecus (Nepal Gray Langur, Semnopithecus schistaceus; Kashmir Gray Langur, Semnopithecus ajax; Tarai Gray Langur, Semnopithecus hector; Northern Plains Gray Langur, Semnopithecus entellus; Black-footed Gray Langur, Semnopithecus hypoleucos; Southern Plains Gray Langur, Semnopithecus dussumieri; Tufted Gray Langur, Semnopithecus priam); within the T. vetulus group or the genus Trachypithecus (Purple-faced Langur, Trachypithecus vetulus; Nilgiri Langur, Trachypithecus johnii); within the T. cristatus group of the genus Trachypithecus (Javan Lutung, Trachypithecus auratus; Silvery Leaf Monkey or Silvery Lutung, Trachypithecus cristatus; Indochinese Lutung, Trachypithecus germaini; Tenasserim Lutung, Trachypithecus barbel); within the T. obscurus group of the genus Trachypithecus (Dusky Leaf Monkey or Spectacled Leaf Monkey, Trachypithecus obscurus; Phayre's Leaf Monkey, Trachypithecus phayrei); within the T. pileatus group of the genus Trachypithecus (Capped Langur, Trachypithecus pileatus; Shortridge's Langur, Trachypithecus shortridgei; Gee's Golden Langur, Trachypithecus geei); within the T. francoisi group of the genus Trachypithecus (Francois' Langur, Trachypithecus francoisi; Hatinh Langur, Trachypithecus hatinhensis; White-headed Langur, Trachypithecus poliocephalus; Laotian Langur, Trachypithecus laotum; Delacour's Langur, Trachypithecus delacouri; Indochinese Black Langur, Trachypithecus ebenus); or within the genus Presbytis (Sumatran Surili, Presbytis melalophos; Banded Surili, Presbytis femoralis; Sarawak Surili, Presbytis chrysomelas; White-thighed Surili, Presbytis siamensis; White-fronted Surili, Presbytis frontata; Javan Surili, Presbytis comata; Thomas's Langur, Presbytis thomasi; Hose's Langur, Presbytis hosei; Maroon Leaf Monkey, Presbytis rubicunda; Mentawai Langur or Joja, Presbytis potenziani; Natuna Island Surili, Presbytis natunae).

[0111] Within the subfamily Colobinae, an advantageous non-chimpanzee primate may alternatively be from the Odd-Nosed group, within the genus Pygathrix (Red-shanked Douc, Pygathrix nemaeus; Black-shanked Douc, Pygathrix nigripes; Gray-shanked Douc, Pygathrix cinerea); within the genus Rhinopithecus (Golden Snub-nosed Monkey, Rhinopithecus roxellana; Black Snub-nosed Monkey, Rhinopithecus bieti; Gray Snub-nosed Monkey, Rhinopithecus brelichi; Tonkin Snub-nosed Langur, Rhinopithecus avunculus); within the genus Nasalis (Proboscis Monkey, Nasalis larvatus); or within the genus Simias (Pig-tailed Langur, Simias concolor).

[0112] As used herein, the term “marmoset” denotes any New-World Monkeys of the genus Callithrix, for example belonging to the Atlantic marmosets of subgenus Callithrix (sic!) (Common Marmoset, Callithrix (Callithrix) jacchus; Black-tufted Marmoset, Callithrix (Callithrix) penicillata; Wied's Marmoset, Callithrix (Callithrix) kuhlii; White-headed Marmoset, Callithrix (Callithrix) geoffroyi; Buffy-headed Marmoset, Callithrix (Callithrix) flaviceps; Buffy-tufted Marmoset, Callithrix (Callithrix) aurita); belonging to the Amazonian marmosets of subgenus Mico (Rio Acari Marmoset, Callithrix (Mico) acariensis; Manicore Marmoset, Callithrix (Mico) manicorensis; Silvery Marmoset, Callithrix (Mico) argentata; White Marmoset, Callithrix (Mico) leucippe; Emilia's Marmoset, Callithrix (Mico) emiliae; Black-headed Marmoset, Callithrix (Mico) nigriceps; Marca's Marmoset, Callithrix (Mico) marcai; Black-tailed Marmoset, Callithrix (Mico) melanura; Santarem Marmoset, Callithrix (Mico) humeralifera; Maués Marmoset, Callithrix (Mico) mauesi; Gold-and-white Marmoset, Callithrix (Mico) chrysoleuca; Hershkovitz's Marmoset, Callithrix (Mico) intermedia; Satéré Marmoset, Callithrix (Mico) saterei); Roosmalens' Dwarf Marmoset belonging to the subgenus Callibella (Callithrix (Callibella) humilis); or the Pygmy Marmoset belonging to the subgenus Cebuella (Callithrix (Cebuella) pygmaea).

[0113] Other genera of the New-World Monkeys comprise tamarins of the genus Saguinus (comprising the S. oedipus-group, the S. midas group, the S. nigricollis group, the S. mystax group, the S. bicolor group and the S. inustus group) and squirrel monkeys of the genus Samiri (e.g. Saimiri sciureus, Saimiri oerstedii, Saimiri ustus, Saimiri boliviensis, Saimiri vanzolini)

[0114] In a preferred embodiment of the bispecific single chain antibody molecule of the invention, the non-chimpanzee primate is an old world monkey. In a more preferred embodiment of the polypeptide, the old world monkey is a monkey of the Papio genus Macaque genus. Most preferably, the monkey of the Macaque genus is Assamese macaque (Macaca assamensis), Barbary macaque (Macaca sylvanus), Bonnet macaque (Macaca radiata), Booted or Sulawesi-Booted macaque (Macaca ochreata), Sulawesi-crested macaque (Macaca nigra), Formosan rock macaque (Macaca cyclopsis), Japanese snow macaque or Japanese macaque (Macaca fuscata), Cynomologus monkey or crab-eating macaque or long-tailed macaque or Java macaque (Macaca fascicularis), Lion-tailed macaque (Macaca silenus), Pigtailed macaque (Macaca nemestrina), Rhesus macaque (Macaca mulatta), Tibetan macaque (Macaca thibetana), Tonkean macaque (Macaca tonkeana), Toque macaque (Macaca sinica), Stump-tailed macaque or Red-faced macaque or Bear monkey (Macaca arctoides), or Moor macaque (Macaca maurus). Most preferably, the monkey of the Papio genus is Hamadryas Baboon, Papio hamadryas; Guinea Baboon, Papio papio; Olive Baboon, Papio anubis; Yellow Baboon, Papio cynocephalus; Chacma Baboon, Papio ursinus.

[0115] In an alternatively preferred embodiment of the bispecific single chain antibody molecule of the invention, the non-chimpanzee primate is a new world monkey. In a more preferred embodiment of the polypeptide, the new world monkey is a monkey of the Callithrix genus (marmoset), the Saguinus genus or the Samiri genus. Most preferably, the monkey of the Callithrix genus is Callithrix jacchus, the monkey of the Saguinus genus is Saguinus oedipus and the monkey of the Samiri genus is Saimiri sciureus.

[0116] The term “cell surface antigen” as used herein denotes a molecule, which is displayed on the surface of a cell. In most cases, this molecule will be located in or on the plasma membrane of the cell such that at least part of this molecule remains accessible from outside the cell in tertiary form. A non-limiting example of a cell surface molecule, which is located in the plasma membrane is a transmembrane protein comprising, in its tertiary conformation, regions of hydrophilicity and hydrophobicity. Here, at least one hydrophobic region allows the cell surface molecule to be embedded, or inserted in the hydrophobic plasma membrane of the cell while the hydrophilic regions extend on either side of the plasma membrane into the cytoplasm and extracellular space, respectively. Non-limiting examples of cell surface molecules which are located on the plasma membrane are proteins which have been modified at a cysteine residue to bear a palmitoyl group, proteins modified at a C-terminal cysteine residue to bear a farnesyl group or proteins which have been modified at the C-terminus to bear a glycosyl phosphatidyl inositol (“GPI”) anchor. These groups allow covalent attachment of proteins to the outer surface of the plasma membrane, where they remain accessible for recognition by extracellular molecules such as antibodies. Examples of cell surface antigens are CD3 epsilon and PSCA, respectively CD19, C-MET, Endosialin, EpCAM, IGF-1R or FAPα.

[0117] As described herein above, PSCA is a cell surface antigen which is a target for therapy of various cancers, including, but not limited to prostate cancer, bladder cancer or pancreatic cancer.

[0118] As also described herein above, CD19 is a cell surface antigen which is a target for therapy of various cancers, including, but not limited to B-cell malignancies such as non-Hodgkin Lymphoma, B-cell mediated autoimmune diseases or the depletion of B-cells.

[0119] As further described herein above, C-MET is a cell surface antigen which is a target for therapy of various cancers, including, but not limited to carcinomas, sarcomas, glioblastomas/astrocytomas, melanomas, mesotheliomas, Wilms tumors or hematopoietic malignancies such as leukemias, lymphomas or multiple myelomas. Moreover, as described herein above, Endosialin is a cell surface antigen which is a target for therapy of various cancers, including, but not limited to carcinomas (breast, kidney, lung, colorectal, colon, pancreas mesothelioma), sarcomas, and neuroectodermal tumors (melanoma, glioma, neuroblastoma).

[0120] As also described herein above, EpCAM is a cell surface antigen which is a target for therapy of various cancers, including, but not limited to epithelial cancer or a minimal residual cancer.

[0121] Furthermore, as described herein above, FAP alpha is a cell surface antigen which is a target for therapy of various cancers, including, but not limited to, epithelial cancer. Moreover, as described herein above, IGF-1R is a cell surface antigen which is a target for therapy of various cancers, including, but not limited to, bone or soft tissue cancer (e.g. Ewing sarcoma), breast, liver, lung, head and neck, colorectal, prostate, leiomyosarcoma, cervical and endometrial cancer, ovarian, prostate, and pancreatic cancer, and autoimmune diseases, including, but not limited to, preferably psoriasis.

[0122] In light of this, PSCA, respectively CD19, C-MET, Endosialin, EpCAM, IGF-1R or FAPα can also be characterized as a tumor antigen. The term “tumor antigen” as used herein may be understood as those antigens that are presented on tumor cells. These antigens can be presented on the cell surface with an extracellular part, which is often combined with a transmembrane and cytoplasmic part of the molecule. These antigens can sometimes be presented only by tumor cells and never by the normal ones. Tumor antigens can be exclusively expressed on tumor cells or might represent a tumor specific mutation compared to normal cells. In this case, they are called tumor-specific antigens. More common are antigens that are presented by tumor cells and normal cells, and they are called tumor-associated antigens. These tumor-associated antigens can be overexpressed compared to normal cells or are accessible for antibody binding in tumor cells due to the less compact structure of the tumor tissue compared to normal tissue. Example for tumor antigens in line with the present invention are PSCA, CD19, C-MET, Endosialin, EpCAM, IGF-1R and FAPα.

[0123] As described herein above the bispecific single chain antibody molecule of the invention binds with the first binding domain to an epitope of human and non-chimpanzee primate CD3ε (epsilon) chain, wherein the epitope is part of an amino acid sequence comprised in the group consisting of 27 amino acid residues as depicted in SEQ ID NOs. 2, 4, 6, or 8 or a functional fragment thereof.

[0124] In line with the present invention it is preferred for the bispecific single chain antibody molecule of the invention that said epitope is part of an amino acid sequence comprising 26, 25, 24, 23, 22, 21, 20, 19, 18, 17, 16, 15, 14, 13, 12, 11, 10, 9, 8, 7, 6 or 5 amino acids.

[0125] More preferably, wherein said epitope comprises at least the amino acid sequence Gln-Asp-Gly-Asn-Glu (Q-D-G-N-E).

[0126] Within the present invention, a functional fragment of the N-terminal 1-27 amino acid residues means that said functional fragment is still a context-independent epitope maintaining its three-dimensional structural integrity when taken out of its native environment in the CD3 complex (and fused to a heterologous amino acid sequence such as EpCAM or an immunoglobulin Fc part, e.g. as shown in Example 3.1). The maintenance of the three-dimensional structure within the 27 amino acid N-terminal polypeptide or functional fragment thereof of CD3 epsilon can be used for the generation of binding domains which bind to the N-terminal CD3 epsilon polypeptide fragment in vitro and to the native (CD3 epsilon subunit of the) CD3 complex on T cells in vivo with the same binding affinity. Within the present invention, a functional fragment of the N-terminal 1-27 amino acid residues means that CD3 binding domains provided herein can still bind to such functional fragments in a context-independent manner. The person skilled in the art is aware of methods for epitope mapping to determine which amino acid residues of an epitope are recognized by such anti-CD3 binding domains (e.g. alanine scanning; see appended examples).

[0127] In one embodiment of the invention, the bispecific single chain antibody molecule of the invention comprises a (first) binding domain capable of binding to an epitope of human and non-chimpanzee primate CD3ε chain and a second binding domain capable of binding to the cell surface antigen PSCA. In alternative embodiments of the invention the said second binding domain capable of binding to the cell surface antigen CD19, C-MET, Endosialin, EpCAM, IGF-1R or FAPα

[0128] Within the present invention it is further preferred that the second binding domain binds to the human cell surface antigen PSCA, respectively CD19, C-MET, Endosialin, EpCAM, IGF-1R or FAPα and/or a non-chimpanzee primate PSCA, respectively CD19, C-MET, Endosialin, EpCAM, IGF-1R or FAPα. Particularly preferred, the second binding domain binds to the human cell surface antigen PSCA, respectively CD19, C-MET, Endosialin, EpCAM, IGF-1R or FAPα and a non-chimpanzee primate PSCA, respectively CD19, C-MET, Endosialin, EpCAM, IGF-1R or FAPα, preferably a macaque PSCA, respectively CD19, C-MET, Endosialin, EpCAM, IGF-1R or FAPα. It is to be understood, that the second binding domain binds to at least one non-chimpanzee primate PSCA, respectively CD19, C-MET, Endosialin, EpCAM, IGF-1R or FAPα, however, it may also bind to two, three or more, non-chimpanzee primate PSCA homologs, respectively CD19 homologs, C-MET homologs, Endosialin homologs, EpCAM homologs, IGF-1R homologs or FAPα homologs. For example, the second binding domain may bind to the Cynomogus monkey PSCA, respectively CD19, C-MET, Endosialin, EpCAM, IGF-1R or FAPα, and to the Rhesus monkey PSCA, respectively CD19, C-MET, Endosialin, EpCAM, IGF-1R or FAPα.

[0129] For the generation of the second binding domain of the bispecific single chain antibody molecule of the invention, e.g. bispecific single chain antibodies as defined herein, monoclonal antibodies binding to both of the respective human and/or non-chimpanzee primate cell surface antigen such as PSCA, respectively CD19, C-MET, Endosialin, EpCAM, IGF-1R or FAPα, can be utilized. Appropriate binding domains for the bispecific polypeptide as defined herein e.g. can be derived from cross-species specific monoclonal antibodies by recombinant methods described in the art. A monoclonal antibody binding to a human cell surface antigen and to the homolog of said cell surface antigen in a non-chimpanzee primate can be tested by FACS assays as set forth above. It is evident to those skilled in the art that cross-species specific antibodies can also be generated by hybridoma techniques described in the literature (Milstein and Köhler, Nature 256 (1975), 495-7). For example, mice may be alternately immunized with human and non-chimpanzee primate cell surface antigen, such as PSCA, respectively CD19, C-MET, Endosialin, EpCAM, IGF-1R or FAPα. From these mice, cross-species specific antibody-producing hybridoma cells are isolated via hybridoma technology and analysed by FACS as set forth above. The generation and analysis of bispecific polypeptides such as bispecific single chain antibodies exhibiting cross-species specificity as described herein is shown in the following examples. The advantages of the bispecific single chain antibodies exhibiting cross-species specificity include the points enumerated herein.

[0130] It is particularly preferred for the bispecific single chain antibody molecule of the invention that the first binding domain capable of binding to an epitope of human and non-chimpanzee primate CD3ε chain comprises a VL region comprising CDR-L1, CDR-L2 and CDR-L3 selected from:
[0131] (a) CDR-L1 as depicted in SEQ ID NO. 27, CDR-L2 as depicted in SEQ ID NO. 28 and CDR-L3 as depicted in SEQ ID NO. 29;
[0132] (b) CDR-L1 as depicted in SEQ ID NO. 117, CDR-L2 as depicted in SEQ ID NO. 118 and CDR-L3 as depicted in SEQ ID NO. 119; and
[0133] (c) CDR-L1 as depicted in SEQ ID NO. 153, CDR-L2 as depicted in SEQ ID NO. 154 and CDR-L3 as depicted in SEQ ID NO. 155.

[0134] The variable regions, i.e. the variable light chain (“L” or “VL”) and the variable heavy chain (“H” or “VH”) are understood in the art to provide the binding domain of an antibody. This variable regions harbor the complementary determining regions. The term “complementary determining region” (CDR) is well known in the art to dictate the antigen specificity of an antibody. The term “CDR-L” or “L CDR” or “LCDR” refers to CDRs in the VL, whereas the term “CDR-H” or “H CDR” or “HCDR” refers to the CDRs in the VH.

[0135] In an alternatively preferred embodiment of the bispecific single chain antibody molecule of the invention the first binding domain capable of binding to an epitope of human and non-chimpanzee primate CD3ε chain comprises a VH region comprising CDR-H 1, CDR-H2 and CDR-H3 selected from:
[0136] (a) CDR-H1 as depicted in SEQ ID NO. 12, CDR-H2 as depicted in SEQ ID NO. 13 and CDR-H3 as depicted in SEQ ID NO. 14;
[0137] (b) CDR-H1 as depicted in SEQ ID NO. 30, CDR-H2 as depicted in SEQ ID NO. 31 and CDR-H3 as depicted in SEQ ID NO. 32;
[0138] (c) CDR-H1 as depicted in SEQ ID NO. 48, CDR-H2 as depicted in SEQ ID NO. 49 and CDR-H3 as depicted in SEQ ID NO. 50;
[0139] (d) CDR-H1 as depicted in SEQ ID NO. 66, CDR-H2 as depicted in SEQ ID NO. 67 and CDR-H3 as depicted in SEQ ID NO. 68;
[0140] (e) CDR-H1 as depicted in SEQ ID NO. 84, CDR-H2 as depicted in SEQ ID NO. 85 and CDR-H3 as depicted in SEQ ID NO. 86;
[0141] (f) CDR-H1 as depicted in SEQ ID NO. 102, CDR-H2 as depicted in SEQ ID NO. 103 and CDR-H3 as depicted in SEQ ID NO. 104;
[0142] (g) CDR-H1 as depicted in SEQ ID NO. 120, CDR-H2 as depicted in SEQ ID NO. 121 and CDR-H3 as depicted in SEQ ID NO. 122;
[0143] (h) CDR-H1 as depicted in SEQ ID NO. 138, CDR-H2 as depicted in SEQ ID NO. 139 and CDR-H3 as depicted in SEQ ID NO. 140;
[0144] (i) CDR-H1 as depicted in SEQ ID NO. 156, CDR-H2 as depicted in SEQ ID NO. 157 and CDR-H3 as depicted in SEQ ID NO. 158; and
[0145] (j) CDR-H1 as depicted in SEQ ID NO. 174, CDR-H2 as depicted in SEQ ID NO. 175 and CDR-H3 as depicted in SEQ ID NO. 176.

[0146] It is further preferred that the binding domain capable of binding to an epitope of human and non-chimpanzee primate CD3ε chain comprises a VL region selected from the group consisting of a VL region as depicted in SEQ ID NO. 35, 39, 125, 129, 161 or 165.

[0147] It is alternatively preferred that the first binding domain capable of binding to an epitope of human and non-chimpanzee primate CD3ε chain comprises a VH region selected from the group consisting of a VH region as depicted in SEQ ID NO. 15, 19, 33, 37, 51, 55, 69, 73, 87, 91, 105, 109, 123, 127, 141, 145, 159, 163, 177 or 181.

[0148] More preferably, the bispecific single chain antibody molecule of the invention is characterized by the first binding domain capable of binding to an epitope of human and non-chimpanzee primate CD3ε chain, which comprises a VL region and a VH region selected from the group consisting of:
[0149] (a) a VL region as depicted in SEQ ID NO. 17 or 21 and a VH region as depicted in SEQ ID NO. 15 or 19;
[0150] (b) a VL region as depicted in SEQ ID NO. 35 or 39 and a VH region as depicted in SEQ ID NO. 33 or 37;
[0151] (c) a VL region as depicted in SEQ ID NO. 53 or 57 and a VH region as depicted in SEQ ID NO. 51 or 55;
[0152] (d) a VL region as depicted in SEQ ID NO. 71 or 75 and a VH region as depicted in SEQ ID NO. 69 or 73;
[0153] (e) a VL region as depicted in SEQ ID NO. 89 or 93 and a VH region as depicted in SEQ ID NO. 87 or 91;
[0154] (f) a VL region as depicted in SEQ ID NO. 107 or 111 and a VH region as depicted in SEQ ID NO. 105 or 109;
[0155] (g) a VL region as depicted in SEQ ID NO. 125 or 129 and a VH region as depicted in SEQ ID NO. 123 or 127;
[0156] (h) a VL region as depicted in SEQ ID NO. 143 or 147 and a VH region as depicted in SEQ ID NO. 141 or 145;
[0157] (i) a VL region as depicted in SEQ ID NO. 161 or 165 and a VH region as depicted in SEQ ID NO. 159 or 163; and
[0158] (j) a VL region as depicted in SEQ ID NO. 179 or 183 and a VH region as depicted in SEQ ID NO. 177 or 181.

[0159] According to a preferred embodiment of the bispecific single chain antibody molecule of the invention the pairs of VH-regions and VL-regions in the first binding domain binding to CD3 epsilon are in the format of a single chain antibody (scFv). The VH and VL regions are arranged in the order VH-VL or VL-VH. It is preferred that the VH-region is positioned N-terminally to a linker sequence. The VL-region is positioned C-terminally of the linker sequence. Put in other words, the domain arrangement in the CD3 binding domain of the bispecific single chain antibody molecule of the invention is preferably VH-VL, with said CD3 binding domain located C-terminally to the second (cell surface antigen, such as PSCA, CD19, C-MET, Endosialin, EpCAM, IGF-1R or FAPα) binding domain. Preferably the VH-VL comprises or is SEQ ID NO. 185.

[0160] A preferred embodiment of the above described bispecific single chain antibody molecule of the invention is characterized by the first binding domain capable of binding to an epitope of human and non-chimpanzee primate CD3ε chain comprising an amino acid sequence selected from the group consisting of SEQ ID NOs: 23, 25, 41, 43, 59, 61, 77, 79, 95, 97, 113, 115, 131, 133, 149, 151, 167, 169, 185 or 187.

[0161] The invention further relates to an above described bispecific single chain antibody, wherein the second binding domain binds to the cell surface antigen PSCA, CD19, C-MET, Endosialin, EpCAM, IGF-1R or FAPα.

### PSCA×CD3

[0162] According to a preferred embodiment of the invention an above characterized bispecific single chain antibody molecule comprises a group of the following sequences as CDR H1, CDR H2, CDR H3, CDR L1, CDR L2 and CDR L3 in the second binding domain selected from the group consisting of:
[0163] a) CDR H1-3 of SEQ ID NO: 382-384 and CDR L1-3 of SEQ ID NO: 377-379;
[0164] b) CDR H1-3 of SEQ ID NO: 400-402 and CDR L1-3 of SEQ ID NO: 395-397;
[0165] c) CDR H1-3 of SEQ ID NO: 414-416 and CDR L1-3 of SEQ ID NO: 409-411;
[0166] d) CDR H1-3 of SEQ ID NO: 432-434 and CDR L1-3 of SEQ ID NO: 427-429;
[0167] e) CDR H1-3 of SEQ ID NO: 1215-1217 and CDR L1-3 of SEQ ID NO: 1220-1222;
[0168] f) CDR H1-3 of SEQ ID NO: 1187-1189 and CDR L1-3 of SEQ ID NO: 1192-1194;
[0169] g) CDR H1-3 of SEQ ID NO: 1173-1175 and CDR L1-3 of SEQ ID NO: 1178-1180;
[0170] h) CDR H1-3 of SEQ ID NO: 1229-1231 and CDR L1-3 of SEQ ID NO: 1234-1236;
[0171] i) CDR H1-3 of SEQ ID NO: 1201-1203 and CDR L1-3 of SEQ ID NO: 1206-1208;
[0172] k) CDR H1-3 of SEQ ID NO: 1257-1259 and CDR L1-3 of SEQ ID NO: 1262-1264; and
[0173] l) CDR H1-3 of SEQ ID NO: 1243-1245 and CDR L1-3 of SEQ ID NO: 1248-1250.

[0174] The sequences of the corresponding VL- and VH-regions of the second binding domain of the bispecific single chain antibody molecule of the invention as well as of the respective scFvs are shown in the sequence listing.

[0175] In the bispecific single chain antibody molecule of the invention the binding domains are arranged in the order VL-VH-VH-VL, VL-VH-VL-VH, VH-VL-VH-VL or VH-VL-VL-VH, as exemplified in the appended examples. Preferably, the binding domains are arranged in the order VH PSCA-VL PSCA-VH CD3-VL CD3 or VL PSCA-VH PSCA-VH CD3-VL CD3.

[0176] A particularly preferred embodiment of the invention concerns an above characterized polypeptide, wherein the bispecific single chain antibody molecule comprises a sequence selected from:
[0177] (a) an amino acid sequence as depicted in any of SEQ ID NOs: 389, 421, 439, 391, 405, 423, 441, 1226, 1198, 1184, 1240, 1212, 1268 or 1254
[0178] (b) an amino acid sequence encoded by a nucleic acid sequence as depicted in any of SEQ ID NOs: 390, 422, 440, 392, 406, 424, 442, 1227, 1199, 1185, 1241, 1213, 1269 or 1255; and
[0179] (c) an amino acid sequence at least 90% identical, more preferred at least 95% identical, most preferred at least 96% identical to the amino acid sequence of (a) or (b).

[0180] The invention relates to a bispecific single chain antibody molecule comprising an amino acid sequence as depicted in any of SEQ ID NOs: 389, 421, 439, 391, 405, 423, 441, 1226, 1198, 1184, 1240, 1212, 1268 or 1254, as well as to an amino acid sequences at least 85% identical, preferably 90%, more preferred at least 95 identical, most preferred at least 96, 97, 98, or 99% identical to the amino acid sequence of SEQ ID NOs: 389, 421, 439, 391, 405, 423, 441, 1226, 1198, 1184, 1240, 1212, 1268 or 1254. The invention relates also to the corresponding nucleic acid sequences as depicted in any of SEQ ID NOs: 390, 422, 440, 392, 406, 424, 442, 1227, 1199, 1185, 1241, 1213, 1269 or 1255 as well as to nucleic acid sequences at least 85% identical, preferably 90%, more preferred at least 95 identical, most preferred at least 96, 97, 98, or 99% identical to the nucleic acid sequences shown in SEQ ID NOs: 390, 422, 440, 392, 406, 424, 442, 1227, 1199, 1185, 1241, 1213, 1269 or 1255. It is to be understood that the sequence identity is determined over the entire nucleotide or amino acid sequence. For sequence alignments, for example, the programs Gap or BestFit can be used (Needleman and Wunsch J. Mol. Biol. 48 (1970), 443-453; Smith and Waterman, Adv. Appl. Math 2 (1981), 482-489), which is contained in the GCG software package (Genetics Computer Group, 575 Science Drive, Madison, Wis., USA 53711 (1991). It is a routine method for those skilled in the art to determine and identify a nucleotide or amino acid sequence having e.g. 85% (90%, 95%, 96%, 97%, 98% or 99%) sequence identity to the nucleotide or amino acid sequences of the bispecific single single chain antibody of the invention. For example, according to Crick's Wobble hypothesis, the 5′ base on the anti-codon is not as spatially confined as the other two bases, and could thus have non-standard base pairing. Put in other words: the third position in a codon triplet may vary so that two triplets which differ in this third position may encode the same amino acid residue. Said hypothesis is well known to the person skilled in the art (see e.g. http://en.wikipedia.org/wiki/Wobble_Hypothesis; Crick, J Mol Biol 19 (1966): 548-55).

[0181] Preferred domain arrangements in the PSCA×CD3 bispecific single chain antibody constructs of the invention are shown in the following examples.

[0182] In a preferred embodiment of the invention, the bispecific single chain antibodies are cross-species specific for CD3 epsilon and for the human and non-chimpanzee primate cell surface antigen PSCA recognized by their second binding domain.

### CD19×CD3

[0183] According to an alternatively preferred embodiment of the invention an above characterized bispecific single chain antibody molecule comprises a group of the following sequences as CDR H1, CDR H2, CDR H3, CDR L1, CDR L2 and CDR L3 in the second binding domain selected from the group consisting of:
[0184] a) CDR H1-3 of SEQ ID NO: 478-480 and CDR L1-3 of SEQ ID NO: 473-475;
[0185] b) CDR H1-3 of SEQ ID NO: 530-532 and CDR L1-3 of SEQ ID NO: 525-527;
[0186] c) CDR H1-3 of SEQ ID NO: 518-520 and CDR L1-3 of SEQ ID NO: 513-515;
[0187] d) CDR H1-3 of SEQ ID NO: 506-508 and CDR L1-3 of SEQ ID NO: 501-503;
[0188] e) CDR H1-3 of SEQ ID NO: 494-496 and CDR L1-3 of SEQ ID NO: 489-491;
[0189] f) CDR H1-3 of SEQ ID NO: 542-544 and CDR L1-3 of SEQ ID NO: 537-539;
[0190] g) CDR H1-3 of SEQ ID NO: 554-556 and CDR L1-3 of SEQ ID NO: 549-551;
[0191] h) CDR H1-3 of SEQ ID NO: 566-568 and CDR L1-3 of SEQ ID NO: 561-563;
[0192] i) CDR H1-3 of SEQ ID NO: 578-580 and CDR L1-3 of SEQ ID NO: 573-575;
[0193] j) CDR H1-3 of SEQ ID NO: 590-592 and CDR L1-3 of SEQ ID NO: 585-587;
[0194] k) CDR H1-3 of SEQ ID NO: 602-604 and CDR L1-3 of SEQ ID NO: 597-599;
[0195] l) CDR H1-3 of SEQ ID NO: 614-616 and CDR L1-3 of SEQ ID NO: 609-611;
[0196] m) CDR H1-3 of SEQ ID NO: 626-628 and CDR L1-3 of SEQ ID NO: 621-623;
[0197] n) CDR H1-3 of SEQ ID NO: 638-640 and CDR L1-3 of SEQ ID NO: 633-635;
[0198] o) CDR H1-3 of SEQ ID NO: 650-652 and CDR L1-3 of SEQ ID NO: 645-647;
[0199] p) CDR H1-3 of SEQ ID NO: 662-664 and CDR L1-3 of SEQ ID NO: 657-659;
[0200] q) CDR H1-3 of SEQ ID NO: 674-676 and CDR L1-3 of SEQ ID NO: 669-671;
[0201] r) CDR H1-3 of SEQ ID NO: 686-688 and CDR L1-3 of SEQ ID NO: 681-683;
[0202] s) CDR H1-3 of SEQ ID NO: 698-700 and CDR L1-3 of SEQ ID NO: 693-695;
[0203] t) CDR H1-3 of SEQ ID NO: 710-712 and CDR L1-3 of SEQ ID NO: 705-707;
[0204] u) CDR H1-3 of SEQ ID NO: 722-724 and CDR L1-3 of SEQ ID NO: 717-719;
[0205] v) CDR H1-3 of SEQ ID NO: 734-736 and CDR L1-3 of SEQ ID NO: 729-731;
[0206] w) CDR H1-3 of SEQ ID NO: 746-748 and CDR L1-3 of SEQ ID NO: 741-743;
[0207] x) CDR H1-3 of SEQ ID NO: 758-760 and CDR L1-3 of SEQ ID NO: 753-755;
[0208] y) CDR H1-3 of SEQ ID NO: 1271-1273 and CDR L1-3 of SEQ ID NO: 1276-1278;
[0209] z) CDR H1-3 of SEQ ID NO: 1285-1287 and CDR L1-3 of SEQ ID NO: 1290-1292;
[0210] aa) CDR H1-3 of SEQ ID NO: 1299-1301 and CDR L1-3 of SEQ ID NO: 1304-1306;
[0211] ab) CDR H1-3 of SEQ ID NO: 1313-1315 and CDR L1-3 of SEQ ID NO: 1318-1320;
[0212] ac) CDR H1-3 of SEQ ID NO: 1327-1329 and CDR L1-3 of SEQ ID NO: 1332-1334;
[0213] ad) CDR H1-3 of SEQ ID NO: 1341-1343 and CDR L1-3 of SEQ ID NO: 1346-1348;
[0214] ae) CDR H1-3 of SEQ ID NO: 1355-1357 and CDR L1-3 of SEQ ID NO: 1360-1362;
[0215] af) CDR H1-3 of SEQ ID NO: 1369-1371 and CDR L1-3 of SEQ ID NO: 1374-1376; and
[0216] ag) CDR H1-3 of SEQ ID NO: 1383-1385 and CDR L1-3 of SEQ ID NO: 1388-1390.

[0217] The sequences of the corresponding VL- and VH-regions of the second binding domain of the bispecific single chain antibody molecule of the invention as well as of the respective scFvs are shown in the sequence listing.

[0218] In the bispecific single chain antibody molecule of the invention the binding domains are arranged in the order VL-VH-VH-VL, VL-VH-VL-VH, VH-VL-VH-VL or VH-VL-VL-VH, as exemplified in the appended examples. Preferably, the binding domains are arranged in the order VH CD19-VL CD19-VH CD3-VL CD3 or VL CD19-VH CD19-VH CD3-VL CD3. More preferably, the binding domains are arranged in the order VL CD19-VH CD19-VH CD3-VL CD3.

[0219] A particularly preferred embodiment of the invention concerns an above characterized polypeptide, wherein the bispecific single chain antibody molecule comprises a sequence selected from:
[0220] (a) an amino acid sequence as depicted in any of SEQ ID NOs. 481, 485, 483, 533, 521, 509, 497, 545, 557, 569, 581, 593, 605, 617, 629, 641, 653, 665, 677, 689, 701, 713, 725, 737, 749, 761, 1282, 1296, 1310, 1324, 1338, 1352, 1366, 1380 or 1394;
[0221] (b) an amino acid sequence encoded by a nucleic acid sequence as depicted in any of SEQ ID NOs: 482, 486, 484, 534, 522, 510, 498, 546, 558, 570, 582, 594, 606, 618, 630, 642, 654, 666, 678, 690, 702, 714, 726, 738, 750, 762, 1283, 1297, 1311, 1325, 1339, 1353, 1367, 1381 or 1395; and
[0222] (c) an amino acid sequence at least 90% identical, more preferred at least 95% identical, most preferred at least 96% identical to the amino acid sequence of (a) or (b).

[0223] The invention relates to a bispecific single chain antibody molecule comprising an amino acid sequence as depicted in any of SEQ ID NOs: 481, 485, 483, 533, 521, 509, 497, 545, 557, 569, 581, 593, 605, 617, 629, 641, 653, 665, 677, 689, 701, 713, 725, 737, 749, 761, 1282, 1296, 1310, 1324, 1338, 1352, 1366, 1380 or 1394, as well as to an amino acid sequences at least 85% identical, preferably 90%, more preferred at least 95% identical, most preferred at least 96, 97, 98, or 99% identical to the amino acid sequence of SEQ ID NOs: 481, 485, 483, 533, 521, 509, 497, 545, 557, 569, 581, 593, 605, 617, 629, 641, 653, 665, 677, 689, 701, 713, 725, 737, 749, 761, 1282, 1296, 1310, 1324, 1338, 1352, 1366, 1380 or 1394. The invention relates also to the corresponding nucleic acid sequences as depicted in any of SEQ ID NOs: 482, 486, 484, 534, 522, 510, 498, 546, 558, 570, 582, 594, 606, 618, 630, 642, 654, 666, 678, 690, 702, 714, 726, 738, 750, 762, 1283, 1297, 1311, 1325, 1339, 1353, 1367, 1381 or 1395 as well as to nucleic acid sequences at least 85% identical, preferably 90%, more preferred at least 95% identical, most preferred at least 96, 97, 98, or 99% identical to the nucleic acid sequences shown in SEQ ID NOs: 482, 486, 484, 534, 522, 510, 498, 546, 558, 570, 582, 594, 606, 618, 630, 642, 654, 666, 678, 690, 702, 714, 726, 738, 750, 762, 1283, 1297, 1311, 1325, 1339, 1353, 1367, 1381 or 1395. It is to be understood that the sequence identity is determined over the entire nucleotide or amino acid sequence. For sequence alignments, for example, the programs Gap or BestFit can be used (Needleman and Wunsch J. Mol. Biol. 48 (1970), 443-453; Smith and Waterman, Adv. Appl. Math 2 (1981), 482-489), which is contained in the GCG software package (Genetics Computer Group, 575 Science Drive, Madison, Wis., USA 53711 (1991). It is a routine method for those skilled in the art to determine and identify a nucleotide or amino acid sequence having e.g. 85% (90%, 95%, 96%, 97%, 98% or 99%) sequence identity to the nucleotide or amino acid sequences of the bispecific single chain antibody of the invention. For example, according to Crick's Wobble hypothesis, the 5′ base on the anti-codon is not as spatially confined as the other two bases, and could thus have non-standard base pairing. Put in other words: the third position in a codon triplet may vary so that two triplets which differ in this third position may encode the same amino acid residue. Said hypothesis is well known to the person skilled in the art (see e.g. http://en.wikipedia.org/wiki/Wobble_Hypothesis; Crick, J Mol Biol 19 (1966): 548-55).

[0224] Preferred domain arrangements in the CD19×CD3 bispecific single chain antibody constructs of the invention are shown in the following examples.

[0225] In a preferred embodiment of the invention, the bispecific single chain antibodies are cross-species specific for CD3 epsilon and for the human and non-chimpanzee primate cell surface antigen CD19 recognized by their second binding domain.

c-MET×CD3

[0226] According to a preferred embodiment of the invention an above characterized bispecific single chain antibody molecule comprises a group of the following sequences as CDR H1, CDR H2, CDR H3, CDR L1, CDR L2 and CDR L3 in the second binding domain selected from the group consisting of:
[0227] a) CDR H1-3 of SEQ ID NO: 821-823 and CDR L1-3 of SEQ ID NO: 816-818;
[0228] b) CDR H1-3 of SEQ ID NO: 836-838 and CDR L1-3 of SEQ ID NO: 833-835;
[0229] c) CDR H1-3 of SEQ ID NO: 845-847 and CDR L1-3 of SEQ ID NO: 840-842;
[0230] d) CDR H1-3 of SEQ ID NO: 863-865 and CDR L1-3 of SEQ ID NO: 858-860;
[0231] e) CDR H1-3 of SEQ ID NO: 881-883 and CDR L1-3 of SEQ ID NO: 876-878;
[0232] f) CDR H1-3 of SEQ ID NO: 899-901 and CDR L1-3 of SEQ ID NO: 894-896;
[0233] g) CDR H1-3 of SEQ ID NO: 1401-1403 and CDR L1-3 of SEQ ID NO: 1406-1408;
[0234] h) CDR H1-3 of SEQ ID NO: 1415-1417 and CDR L1-3 of SEQ ID NO: 1420-1422;
[0235] i) CDR H1-3 of SEQ ID NO: 1429-1431 and CDR L1-3 of SEQ ID NO: 1434-1436;
[0236] j) CDR H1-3 of SEQ ID NO: 1443-1445 and CDR L1-3 of SEQ ID NO: 1448-1450;
[0237] k) CDR H1-3 of SEQ ID NO: 1457-1459 and CDR L1-3 of SEQ ID NO: 1462-1464;
[0238] l) CDR H1-3 of SEQ ID NO: 1471-1473 and CDR L1-3 of SEQ ID NO: 1476-1478;
[0239] m) CDR H1-3 of SEQ ID NO: 1639-1641 and CDR L1-3 of SEQ ID NO: 1644-1646;
[0240] n) CDR H1-3 of SEQ ID NO: 1625-1627 and CDR L1-3 of SEQ ID NO: 1630-1632;
[0241] o) CDR H1-3 of SEQ ID NO: 1611-1613 and CDR L1-3 of SEQ ID NO: 1616-1618;
[0242] p) CDR H1-3 of SEQ ID NO: 1597-1599 and CDR L1-3 of SEQ ID NO: 1602-1604;
[0243] q) CDR H1-3 of SEQ ID NO: 1569-1571 and CDR L1-3 of SEQ ID NO: 1574-1576;
[0244] r) CDR H1-3 of SEQ ID NO: 1555-1557 and CDR L1-3 of SEQ ID NO: 1560-1562;
[0245] s) CDR H1-3 of SEQ ID NO: 1583-1585 and CDR L1-3 of SEQ ID NO: 1588-1590;
[0246] t) CDR H1-3 of SEQ ID NO: 1541-1543 and CDR L1-3 of SEQ ID NO: 1546-1548;
[0247] u) CDR H1-3 of SEQ ID NO: 1513-1515 and CDR L1-3 of SEQ ID NO: 1518-1520;
[0248] v) CDR H1-3 of SEQ ID NO: 1527-1529 and CDR L1-3 of SEQ ID NO: 1532-1534;
[0249] w) CDR H1-3 of SEQ ID NO: 1499-1501 and CDR L1-3 of SEQ ID NO: 1504-1506; and
[0250] x) CDR H1-3 of SEQ ID NO: 1485-1487 and CDR L1-3 of SEQ ID NO: 1490-1492.

[0251] The sequences of the corresponding VL- and VH-regions of the second binding domain of the bispecific single chain antibody molecule of the invention as well as of the respective scFvs are shown in the sequence listing.

[0252] In the bispecific single chain antibody molecule of the invention the binding domains are arranged in the order VL-VH-VH-VL, VL-VH-VL-VH, VH-VL-VH-VL or VH-VL-VL-VH, as exemplified in the appended examples. Preferably, the binding domains are arranged in the order VH C-MET-VL C-MET-VH CD3-VL CD3 or VL C-MET-VH C-MET-VH CD3-VL CD3.

[0253] A particularly preferred embodiment of the invention concerns an above characterized polypeptide, wherein the bispecific single chain antibody molecule comprises a sequence selected from:
[0254] (a) an amino acid sequence as depicted in any of SEQ ID NOs. 829, 853, 871, 889, 831, 855, 873, 891, 905, 1412, 1426, 1440, 1454, 1468 or 1482;
[0255] (b) an amino acid sequence encoded by a nucleic acid sequence as depicted in any of SEQ ID NOs: 830, 854, 872, 890, 832, 856, 874, 892, 906, 1413, 1427, 1441, 1455, 1469, or 1483; and
[0256] (c) an amino acid sequence at least 90% identical, more preferred at least 95% identical, most preferred at least 96% identical to the amino acid sequence of (a) or (b).

[0257] The invention relates to a bispecific single chain antibody molecule comprising an amino acid sequence as depicted in any of SEQ ID NOs: 829, 853, 871, 889, 831, 855, 873, 891, 905, 1412, 1426, 1440, 1454, 1468 or 1482; as well as to an amino acid sequences at least 85% identical, preferably 90%, more preferred at least 95 identical, most preferred at least 96, 97, 98, or 99% identical to the amino acid sequence of SEQ ID NOs: 829, 853, 871, 889, 831, 855, 873, 891, 905, 1412, 1426, 1440, 1454, 1468 or 1482. The invention relates also to the corresponding nucleic acid sequences as depicted in any of SEQ ID NOs: 830, 854, 872, 890, 832, 856, 874, 892, 906, 1413, 1427, 1441, 1455, 1469, or 1483; as well as to nucleic acid sequences at least 85% identical, preferably 90%, more preferred at least 95 identical, most preferred at least 96, 97, 98, or 99% identical to the nucleic acid sequences shown in SEQ ID NOs: 830, 854, 872, 890, 832, 856, 874, 892, 906, 1413, 1427, 1441, 1455, 1469, or 1483. It is to be understood that the sequence identity is determined over the entire nucleotide or amino acid sequence. For sequence alignments, for example, the programs Gap or BestFit can be used (Needleman and Wunsch J. Mol. Biol. 48 (1970), 443-453; Smith and Waterman, Adv. Appl. Math 2 (1981), 482-489), which is contained in the GCG software package (Genetics Computer Group, 575 Science Drive, Madison, Wis., USA 53711 (1991). It is a routine method for those skilled in the art to determine and identify a nucleotide or amino acid sequence having e.g. 85% (90%, 95%, 96%, 97%, 98% or 99%) sequence identity to the nucleotide or amino acid sequences of the bispecific single chain antibody of the invention. For example, according to Crick's Wobble hypothesis, the 5′ base on the anti-codon is not as spatially confined as the other two bases, and could thus have non-standard base pairing. Put in other words: the third position in a codon triplet may vary so that two triplets which differ in this third position may encode the same amino acid residue. Said hypothesis is well known to the person skilled in the art (see e.g. http://en.wikipedia.org/wiki/Wobble_Hypothesis; Crick, J Mol Biol 19 (1966): 548-55).

[0258] Preferred domain arrangements in the C-MET×CD3 bispecific single chain antibody constructs of the invention are shown in the following examples.

[0259] In a preferred embodiment of the invention, the bispecific single chain antibodies are cross-species specific for CD3 epsilon and for the human and non-chimpanzee primate cell surface antigen C-MET recognized by their second binding domain.

### Endosialin×CD3

[0260] According to a preferred embodiment of the invention an above characterized bispecific single chain antibody molecule comprises a group of the following sequences as CDR H1, CDR H2, CDR H3, CDR L1, CDR L2 and CDR L3 in the second binding domain selected from the group consisting of:
[0261] CDR H1-3 of SEQ ID NO: 910-912 and CDR L1-3 of SEQ ID NO: 907-909.

[0262] Starting from these CDR sequences of the heavy and light chain for the second binding domain the person skilled in the art can produce a bispecific single chain antibody molecule of the invention without any further inventive ado. In particular, the CDR sequences can be positioned in a framework of a VL and a VH chain and arranged in form of a scFv.

[0263] According to a preferred embodiment of the invention an above characterized bispecific single chain antibody molecule comprises a group of the following sequences as CDR H1, CDR H2, CDR H3, CDR L1, CDR L2 and CDR L3 in the second binding domain selected from the group consisting of:
[0264] a) CDR H1-3 of SEQ ID NO: 1653-1655 and CDR L1-3 of SEQ ID NO: 1658-1660;
[0265] b) CDR H1-3 of SEQ ID NO: 1667-1669 and CDR L1-3 of SEQ ID NO: 1672-1674;
[0266] c) CDR H1-3 of SEQ ID NO: 1681-1683 and CDR L1-3 of SEQ ID NO: 1686-1688; and
[0267] d) CDR H1-3 of SEQ ID NO: 1695-1697 and CDR L1-3 of SEQ ID NO: 1700-1702;
[0268] e) CDR H1-3 of SEQ ID NO: 1709-1711 and CDR L1-3 of SEQ ID NO: 1714-1716; and
[0269] f) CDR H1-3 of SEQ ID NO: 1723-1725 and CDR L1-3 of SEQ ID NO: 1728-1730.

[0270] In the bispecific single chain antibody molecule of the invention the binding domains are arranged in the order VL-VH-VH-VL, VL-VH-VL-VH, VH-VL-VH-VL or VH-VL-VL-VH, as exemplified in the appended examples. Preferably, the binding domains are arranged in the order VH Endosialin-VL Endosialin-VH CD3-VL CD3 or VL Endosialin-VH Endosialin-VH CD3-VL CD3.

[0271] A particularly preferred embodiment of the invention concerns an above characterized polypeptide, wherein the bispecific single chain antibody molecule comprises an above characterized first binding domain capable of binding to an epitope of human and non-chimpanzee primate CD3ε and a second binding domain capable of binding to Endosialin and comprising the CDR H1, 2 and 3 of SEQ ID NOs: 910-912 and the CDR L1, 2 and 3 of SEQ ID NOs: 907-909, or CDR amino acid sequences at least 50%, 60%, 70%, 75%, 80%, 85%, or 90% identical, more preferred at least 95% identical, most preferred at least 96%, 97%, 98%, or 99% identical to each of the respective amino acid sequences of the above defined CDRs. It is to be understood that the sequence identity is determined over the entire CDRH or CDRL amino acid sequence.

[0272] A particularly preferred embodiment of the invention concerns an above characterized polypeptide, wherein the bispecific single chain antibody molecule comprises a sequence selected from:
[0273] (a) an amino acid sequence as depicted in any of SEQ ID NOs. 1664, 1678, 1692, 1706, 1720, or 1734;
[0274] (b) an amino acid sequence encoded by a nucleic acid sequence as depicted in any of SEQ ID NOs: 1665, 1679, 1693, 1707, 1721, or 1735; and
[0275] (c) an amino acid sequence at least 90% identical, more preferred at least 95% identical, most preferred at least 96% identical to the amino acid sequence of (a) or (b).

[0276] The invention relates to a bispecific single chain antibody molecule comprising an amino acid sequence as depicted in any of SEQ ID NOs: 1664, 1678, 1692, 1706, 1720, or 1734, as well as to an amino acid sequences at least 85% identical, preferably 90%, more preferred at least 95% identical, most preferred at least 96, 97, 98, or 99% identical to the amino acid sequence of SEQ ID NOs: 1664, 1678, 1692, 1706, 1720, or 1734. The invention relates also to the corresponding nucleic acid sequences as depicted in any of SEQ ID NOs: 1665, 1679, 1693, 1707, 1721, or 1735; as well as to nucleic acid sequences at least 85% identical, preferably 90%, more preferred at least 95% identical, most preferred at least 96, 97, 98, or 99 identical to the nucleic acid sequences shown in SEQ ID NOs: 1665, 1679, 1693, 1707, 1721, or 1735.

[0277] If not indicated otherwise, it is to be understood that the sequence identity is determined over the entire nucleotide or amino acid sequence. For sequence alignments, for example, the programs Gap or BestFit can be used (Needleman and Wunsch J. Mol. Biol. 48 (1970), 443-453; Smith and Waterman, Adv. Appl. Math 2 (1981), 482-489), which is contained in the GCG software package (Genetics Computer Group, 575 Science Drive, Madison, Wis., USA 53711 (1991). It is a routine method for those skilled in the art to determine and identify a nucleotide or amino acid sequence or CDR sequence having e.g. 50% (60%, 70%, 75%, 80%, 85%, 90%, 95%, 96%, 97%, 98% or 99%) sequence identity to the nucleotide or amino acid or CDR sequences of the bispecific single chain antibody of the invention. For example, according to Crick's Wobble hypothesis, the 5′ base on the anti-codon is not as spatially confined as the other two bases, and could thus have non-standard base pairing. Put in other words: the third position in a codon triplet may vary so that two triplets which differ in this third position may encode the same amino acid residue. Said hypothesis is well known to the person skilled in the art (see e.g. http://en.wikipedia.org/wiki/Wobble_Hypothesis; Crick, J Mol Biol 19 (1966): 548-55).

[0278] Preferred domain arrangements in the Endosialin×CD3 bispecific single chain antibody constructs of the invention are shown in the following examples.

[0279] In a preferred embodiment of the invention, the bispecific single chain antibodies are cross-species specific for CD3 epsilon and for the human and non-chimpanzee primate cell surface antigen Endosialin recognized by their second binding domain.

### EpCAM×CD3

[0280] According to a preferred embodiment of the invention an above characterized bispecific single chain antibody molecule comprises a group of the following sequences as CDR H1, CDR H2, CDR H3, CDR L1, CDR L2 and CDR L3 in the second binding domain selected from the group consisting of:
[0281] a) CDR H1-3 of SEQ ID NO: 940-942 and CDR L1-3 of SEQ ID NO: 935-937;
[0282] b) CDR H1-3 of SEQ ID NO: 956-958 and CDR L1-3 of SEQ ID NO: 951-953;
[0283] c) CDR H1-3 of SEQ ID NO: 968-970 and CDR L1-3 of SEQ ID NO: 963-965; and
[0284] d) CDR H1-3 of SEQ ID NO: 980-982 and CDR L1-3 of SEQ ID NO: 975-977;
[0285] e) CDR H1-3 of SEQ ID NO: 992-994 and CDR L1-3 of SEQ ID NO: 987-989;
[0286] f) CDR H1-3 of SEQ ID NO: 1004-1006 and CDR L1-3 of SEQ ID NO: 999-1001;
[0287] g) CDR H1-3 of SEQ ID NO: 1028-1030 and CDR L1-3 of SEQ ID NO: 1023-1025;
[0288] h) CDR H1-3 of SEQ ID NO: 1040-1042 and CDR L1-3 of SEQ ID NO: 1035-1037;
[0289] i) CDR H1-3 of SEQ ID NO: 1052-1054 and CDR L1-3 of SEQ ID NO: 1047-1049;
[0290] j) CDR H1-3 of SEQ ID NO: 1074-1076 and CDR L1-3 of SEQ ID NO: 1069-1071;
[0291] k) CDR H1-3 of SEQ ID NO: 1086-1088 and CDR L1-3 of SEQ ID NO: 1081-1083;
[0292] l) CDR H1-3 of SEQ ID NO: 1098-1000 and CDR L1-3 of SEQ ID NO: 1093-1095;
[0293] m) CDR H1-3 of SEQ ID NO: 1110-1112 and CDR L1-3 of SEQ ID NO: 1105-1107;
[0294] n) CDR H1-3 of SEQ ID NO: 1122-1124 and CDR L1-3 of SEQ ID NO: 1117-1119;
[0295] o) CDR H1-3 of SEQ ID NO: 1016-1018 and CDR L1-3 of SEQ ID NO: 1011-1013; and
[0296] p) CDR H1-3 of SEQ ID NO: 1765-1767 and CDR L1-3 of SEQ ID NO: 1770-1772.

[0297] The sequences of the corresponding VL- and VH-regions of the second binding domain of the bispecific single chain antibody molecule of the invention as well as of the respective scFvs are shown in the sequence listing.

[0298] In the bispecific single chain antibody molecule of the invention the binding domains are arranged in the order VL-VH-VH-VL, VL-VH-VL-VH, VH-VL-VH-VL or VH-VL-VL-VH, as exemplified in the appended examples. Preferably, the binding domains are arranged in the order VH EpCAM-VL EpCAM-VH CD3-VL CD3 or VL EpCAM-VH EpCAM-VH CD3-VL CD3. More preferably, the binding domains are arranged in the order VL EpCAM-VH EpCAM-VH CD3-VL CD3.

[0299] A particularly preferred embodiment of the invention concerns an above characterized polypeptide, wherein the bispecific single chain antibody molecule comprises a sequence selected from:
[0300] (a) an amino acid sequence as depicted in any of SEQ ID NOs. 944, 948, 946, 960, 972, 984, 996, 1008, 1032, 1044, 1056, 1078, 1090, 1102, 1114, 1126, 1020, or 1776;
[0301] (b) an amino acid sequence encoded by a nucleic acid sequence as depicted in any of SEQ ID NOs: 945, 949, 947, 961, 973, 985, 979, 1009, 1033, 1045, 1057, 1079, 1091, 1103, 1115, 1127, 1021, or 1777; and
[0302] (c) an amino acid sequence at least 90% identical, more preferred at least 95% identical, most preferred at least 96% identical to the amino acid sequence of (a) or (b).

[0303] The invention relates to a bispecific single chain antibody molecule comprising an amino acid sequence as depicted in any of SEQ ID NOs: 944, 948, 946, 960, 972, 984, 996, 1008, 1032, 1044, 1056, 1078, 1090, 1102, 1114, 1126, 1020, or 1776, as well as to an amino acid sequences at least 85% identical, preferably 90%, more preferred at least 95% identical, most preferred at least 96, 97, 98, or 99% identical to the amino acid sequence of SEQ ID NOs: 944, 948, 946, 960, 972, 984, 996, 1008, 1032, 1044, 1056, 1078, 1090, 1102, 1114, 1126, 1020, or 1776. The invention relates also to the corresponding nucleic acid sequences as depicted in any of SEQ ID NOs: 945, 949, 947, 961, 973, 985, 979, 1009, 1033, 1045, 1057, 1079, 1091, 1103, 1115, 1127, 1021, or 1777 as well as to nucleic acid sequences at least 85% identical, preferably 90%, more preferred at least 95% identical, most preferred at least 96, 97, 98, or 99% identical to the nucleic acid sequences shown in SEQ ID NOs: 945, 949, 947, 961, 973, 985, 979, 1009, 1033, 1045, 1057, 1079, 1091, 1103, 1115, 1127, 1021, or 1777. It is to be understood that the sequence identity is determined over the entire nucleotide or amino acid sequence. For sequence alignments, for example, the programs Gap or BestFit can be used (Needleman and Wunsch J. Mol. Biol. 48 (1970), 443-453; Smith and Waterman, Adv. Appl. Math 2 (1981), 482-489), which is contained in the GCG software package (Genetics Computer Group, 575 Science Drive, Madison, Wis., USA 53711 (1991). It is a routine method for those skilled in the art to determine and identify a nucleotide or amino acid sequence having e.g. 85% (90%, 95%, 96%, 97%, 98% or 99%) sequence identity to the nucleotide or amino acid sequences of the bispecific single single chain antibody of the invention. For example, according to Crick's Wobble hypothesis, the 5′ base on the anti-codon is not as spatially confined as the other two bases, and could thus have non-standard base pairing. Put in other words: the third position in a codon triplet may vary so that two triplets which differ in this third position may encode the same amino acid residue. Said hypothesis is well known to the person skilled in the art (see e.g. http://en.wikipedia.org/wiki/Wobble_Hypothesis; Crick, J Mol Biol 19 (1966): 548-55).

[0304] Preferred domain arrangements in the EpCAM×CD3 bispecific single chain antibody constructs of the invention are shown in the following examples.

[0305] In a preferred embodiment of the invention, the bispecific single chain antibodies are cross-species specific for CD3 epsilon and for the human and non-chimpanzee primate cell surface antigen EpCAM recognized by their second binding domain.

[0306] FAPα×CD3

[0307] According to a preferred embodiment of the invention an above characterized bispecific single chain antibody molecule comprises a group of the following sequences as CDR H1, CDR H2, CDR H3, CDR L1, CDR L2 and CDR L3 in the second binding domain selected from:
[0308] CDR H1-3 of SEQ ID NO: 1137-1139 and CDR L1-3 of SEQ ID NO: 1132-1134.

[0309] The sequences of the corresponding VL- and VH-regions of the second binding domain of the bispecific single chain antibody molecule of the invention as well as of the respective scFvs are shown in the sequence listing.

[0310] According to a preferred embodiment of the invention an above characterized bispecific single chain antibody molecule comprises a group of the following sequences as CDR H1, CDR H2, CDR H3, CDR L1, CDR L2 and CDR L3 in the second binding domain selected from the group consisting of:
[0311] a) CDR H1-3 of SEQ ID NO: 1137-1139 and CDR L1-3 of SEQ ID NO: 1132-1134;
[0312] b) CDR H1-3 of SEQ ID NO: 1849-1851 and CDR L1-3 of SEQ ID NO: 1854-1856;
[0313] c) CDR H1-3 of SEQ ID NO: 1835-1837 and CDR L1-3 of SEQ ID NO: 1840-1842; and
[0314] d) CDR H1-3 of SEQ ID NO: 1779-1781 and CDR L1-3 of SEQ ID NO: 1784-1786;
[0315] e) CDR H1-3 of SEQ ID NO: 1793-1795 and CDR L1-3 of SEQ ID NO: 1798-1800;
[0316] f) CDR H1-3 of SEQ ID NO: 1863-1865 and CDR L1-3 of SEQ ID NO: 1868-1870;
[0317] g) CDR H1-3 of SEQ ID NO: 1807-1809 and CDR L1-3 of SEQ ID NO: 1812-1814;
[0318] h) CDR H1-3 of SEQ ID NO: 1821-1823 and CDR L1-3 of SEQ ID NO: 1826-1828;
[0319] i) CDR H1-3 of SEQ ID NO: 1891-1893 and CDR L1-3 of SEQ ID NO: 1896-1898;
[0320] j) CDR H1-3 of SEQ ID NO: 1877-1879 and CDR L1-3 of SEQ ID NO: 1882-1884;
[0321] k) CDR H1-3 of SEQ ID NO: 1961-1963 and CDR L1-3 of SEQ ID NO: 1966-1968;
[0322] l) CDR H1-3 of SEQ ID NO: 1947-1949 and CDR L1-3 of SEQ ID NO: 1952-1954;
[0323] m) CDR H1-3 of SEQ ID NO: 1975-1977 and CDR L1-3 of SEQ ID NO: 1980-1982;
[0324] n) CDR H1-3 of SEQ ID NO: 1933-1935 and CDR L1-3 of SEQ ID NO: 1938-1940;
[0325] o) CDR H1-3 of SEQ ID NO: 1919-1921 and CDR L1-3 of SEQ ID NO: 1924-1926; and
[0326] p) CDR H1-3 of SEQ ID NO: 1905-1907 and CDR L1-3 of SEQ ID NO: 1910-1912.

[0327] In the bispecific single chain antibody molecule of the invention the binding domains are arranged in the order VL-VH-VH-VL, VL-VH-VL-VH, VH-VL-VH-VL or VH-VL-VL-VH, as exemplified in the appended examples. Preferably, the binding domains are arranged in the order VH FAP alpha-VL FAP alpha-VH CD3-VL CD3 or VL FAP alpha-VH FAP alpha-VH CD3-VL CD3. More preferred, the binding domains are arranged in the order VL FAP alpha-VH FAP alpha-VH CD3-VL CD3.

[0328] A particularly preferred embodiment of the invention concerns an above characterized polypeptide, wherein the bispecific single chain antibody molecule comprises a sequence selected from:
[0329] (a) an amino acid sequence as depicted in any of SEQ ID NOs. 1143, 1147, 1145, 1860, 1846, 1790, 1804, 1874, 1818, or 1832;
[0330] (b) an amino acid sequence encoded by a nucleic acid sequence as depicted in any of SEQ ID NOs: 1144, 1148, 1146, 1861, 1847, 1791, 1805, 1875, 1818 or 1833; and
[0331] (c) an amino acid sequence at least 90% identical, more preferred at least 95% identical, most preferred at least 96% identical to the amino acid sequence of (a) or (b).

[0332] The invention relates to a bispecific single chain antibody molecule comprising an amino acid sequence as depicted in any of SEQ ID NOs: 1143, 1147, 1145, 1860, 1846, 1790, 1804, 1874, 1818, or 1832, as well as to an amino acid sequences at least 85% identical, preferably 90%, more preferred at least 95% identical, most preferred at least 96, 97, 98, or 99% identical to the amino acid sequence of SEQ ID NOs: 1143, 1147, 1145, 1860, 1846, 1790, 1804, 1874, 1818, or 1832. The invention relates also to the corresponding nucleic acid sequences as depicted in any of SEQ ID NOs: 1144, 1148, 1146, 1861, 1847, 1791, 1805, 1875, 1818 or 1833, as well as to nucleic acid sequences at least 85% identical, preferably 90%, more preferred at least 95% identical, most preferred at least 96, 97, 98, or 99% identical to the nucleic acid sequences shown in SEQ ID NOs: 1144, 1148, 1146, 1861, 1847, 1791, 1805, 1875, 1818 or 1833. It is to be understood that the sequence identity is determined over the entire nucleotide or amino acid sequence. For sequence alignments, for example, the programs Gap or BestFit can be used (Needleman and Wunsch J. Mol. Biol. 48 (1970), 443-453; Smith and Waterman, Adv. Appl. Math 2 (1981), 482-489), which is contained in the GCG software package (Genetics Computer Group, 575 Science Drive, Madison, Wis., USA 53711 (1991). It is a routine method for those skilled in the art to determine and identify a nucleotide or amino acid sequence having e.g. 85% (90%, 95%, 96%, 97%, 98% or 99%) sequence identity to the nucleotide or amino acid sequences of the bispecific single single chain antibody of the invention. For example, according to Crick's Wobble hypothesis, the 5′ base on the anti-codon is not as spatially confined as the other two bases, and could thus have non-standard base pairing. Put in other words: the third position in a codon triplet may vary so that two triplets which differ in this third position may encode the same amino acid residue. Said hypothesis is well known to the person skilled in the art (see e.g. http://en.wikipedia.org/wiki/Wobble_Hypothesis; Crick, J Mol Biol 19 (1966): 548-55).

[0333] Preferred domain arrangements in the FAPalpha×CD3 bispecific single chain antibody constructs of the invention are shown in the following examples.

[0334] In a preferred embodiment of the invention, the bispecific single chain antibodies are cross-species specific for CD3 epsilon and for the human and non-chimpanzee primate cell surface antigen FAP alpha recognized by their second binding domain.

### IGF-1R×CD3

[0335] According to a preferred embodiment of the invention an above characterized bispecific single chain antibody molecule comprises a group of the following sequences as CDR H1, CDR H2, CDR H3, CDR L1, CDR L2 and CDR L3 in the second binding domain selected from the group consisting of:
[0336] a) CDR H1-3 of SEQ ID NO: 2016-2018 and CDR L1-3 of SEQ ID NO: 2021-2023;
[0337] b) CDR H1-3 of SEQ ID NO: 2030-2032 and CDR L1-3 of SEQ ID NO: 2035-2037;
[0338] c) CDR H1-3 of SEQ ID NO: 2044-2046 and CDR L1-3 of SEQ ID NO: 2049-2051; and
[0339] d) CDR H1-3 of SEQ ID NO: 2058-2060 and CDR L1-3 of SEQ ID NO: 2063-2065;
[0340] e) CDR H1-3 of SEQ ID NO: 2072-2074 and CDR L1-3 of SEQ ID NO: 2077-2079;
[0341] f) CDR H1-3 of SEQ ID NO: 2086-2088 and CDR L1-3 of SEQ ID NO: 2091-2093;
[0342] g) CDR H1-3 of SEQ ID NO: 2100-2102 and CDR L1-3 of SEQ ID NO: 2105-2107;
[0343] h) CDR H1-3 of SEQ ID NO: 2114-2116 and CDR L1-3 of SEQ ID NO: 2119-2121;
[0344] i) CDR H1-3 of SEQ ID NO: 2128-2130 and CDR L1-3 of SEQ ID NO: 2133-2135;
[0345] j) CDR H1-3 of SEQ ID NO: 2142-2144 and CDR L1-3 of SEQ ID NO: 2147-2149:
[0346] k) CDR H1-3 of SEQ ID NO: 2156-2158 and CDR L1-3 of SEQ ID NO: 2161-2163;
[0347] l) CDR H1-3 of SEQ ID NO: 2170-2172 and CDR L1-3 of SEQ ID NO: 2175-2177;
[0348] m) CDR H1-3 of SEQ ID NO: 2184-2186 and CDR L1-3 of SEQ ID NO: 2189-2191;
[0349] n) CDR H1-3 of SEQ ID NO: 2198-2200 and CDR L1-3 of SEQ ID NO: 2203-2205; and
[0350] o) CDR H1-3 of SEQ ID NO: 2212-2214 and CDR L1-3 of SEQ ID NO: 2217-2219.

[0351] The sequences of the corresponding VL- and VH-regions of the second binding domain of the bispecific single chain antibody molecule of the invention as well as of the respective scFvs are shown in the sequence listing.

[0352] In the bispecific single chain antibody molecule of the invention the binding domains are arranged in the order VL-VH-VH-VL, VL-VH-VL-VH, VH-VL-VH-VL or VH-VL-VL-VH, as exemplified in the appended examples. Preferably, the binding domains are arranged in the order VH IGF-1R-VL IGF-1R-VH CD3-VL CD3 or VL IGF-1R-VH IGF-1R-VH CD3-VL CD3.

[0353] A particularly preferred embodiment of the invention concerns an above characterized polypeptide, wherein the bispecific single chain antibody molecule comprises a sequence selected from:
[0354] (a) an amino acid sequence as depicted in any of SEQ ID NOs: 2027, 2041, 2055, 2069, 2083, 2097, 2111, 2125, 2139, 2153, 2167, 2181, 2195, 2209, or 2223;
[0355] (b) an amino acid sequence encoded by a nucleic acid sequence as depicted in any of SEQ ID NOs: 2028, 2042, 2056, 2070, 2084, 2098, 2112, 2126, 2140, 2154, 2168, 2182, 2196, 2210, or 2224; and
[0356] (c) an amino acid sequence at least 90% identical, more preferred at least 95% identical, most preferred at least 96% identical to the amino acid sequence of (a) or (b).

[0357] The invention relates to a bispecific single chain antibody molecule comprising an amino acid sequence as depicted in any of SEQ ID NOs: 2027, 2041, 2055, 2069, 2083, 2097, 2111, 2125, 2139, 2153, 2167, 2181, 2195, 2209, or 2223, as well as to an amino acid sequences at least 85% identical, preferably 90%, more preferred at least 95% identical, most preferred at least 96, 97, 98, or 99% identical to the amino acid sequence of SEQ ID NOs: 2027, 2041, 2055, 2069, 2083, 2097, 2111, 2125, 2139, 2153, 2167, 2181, 2195, 2209, or 2223. The invention relates also to the corresponding nucleic acid sequences as depicted in any of SEQ ID NOs: 2028, 2042, 2056, 2070, 2084, 2098, 2112, 2126, 2140, 2154, 2168, 2182, 2196, 2210, or 2224 as well as to nucleic acid sequences at least 85% identical, preferably 90%, more preferred at least 95% identical, most preferred at least 96, 97, 98, or 99 identical to the nucleic acid sequences shown in SEQ ID NOs: 2028, 2042, 2056, 2070, 2084, 2098, 2112, 2126, 2140, 2154, 2168, 2182, 2196, 2210, or 2224. It is to be understood that the sequence identity is determined over the entire nucleotide or amino acid sequence. For sequence alignments, for example, the programs Gap or BestFit can be used (Needleman and Wunsch J. Mol. Biol. 48 (1970), 443-453; Smith and Waterman, Adv. Appl. Math 2 (1981), 482-489), which is contained in the GCG software package (Genetics Computer Group, 575 Science Drive, Madison, Wis., USA 53711 (1991). It is a routine method for those skilled in the art to determine and identify a nucleotide or amino acid sequence having e.g. 85% (90%, 95%, 96%, 97%, 98% or 99%) sequence identity to the nucleotide or amino acid sequences of the bispecific single chain antibody of the invention. For example, according to Crick's Wobble hypothesis, the 5′ base on the anti-codon is not as spatially confined as the other two bases, and could thus have non-standard base pairing. Put in other words: the third position in a codon triplet may vary so that two triplets which differ in this third position may encode the same amino acid residue. Said hypothesis is well known to the person skilled in the art (see e.g. http://en.wikipedia.org/wiki/Wobble_Hypothesis; Crick, J Mol Biol 19 (1966): 548-55).

[0358] Preferred domain arrangements in the IGF-1R×CD3 bispecific single chain antibody constructs of the invention are shown in the following examples.

[0359] In a preferred embodiment of the invention, the bispecific single chain antibodies are cross-species specific for CD3 epsilon and for the human and non-chimpanzee primate cell surface antigen IGF-1R recognized by their second binding domain.

[0360] In an alternative embodiment the present invention provides a nucleic acid sequence encoding an above described bispecific single chain antibody molecule of the invention.

[0361] The present invention also relates to a vector comprising the nucleic acid molecule of the present invention.

[0362] Many suitable vectors are known to those skilled in molecular biology, the choice of which would depend on the function desired and include plasmids, cosmids, viruses, bacteriophages and other vectors used conventionally in genetic engineering. Methods which are well known to those skilled in the art can be used to construct various plasmids and vectors; see, for example, the techniques described in Sambrook et al. (loc cit.) and Ausubel, Current Protocols in Molecular Biology, Green Publishing Associates and Wiley Interscience, N.Y. (1989), (1994). Alternatively, the polynucleotides and vectors of the invention can be reconstituted into liposomes for delivery to target cells. As discussed in further details below, a cloning vector was used to isolate individual sequences of DNA. Relevant sequences can be transferred into expression vectors where expression of a particular polypeptide is required. Typical cloning vectors include pBluescript SK, pGEM, pUC9, pBR322 and pGBT9. Typical expression vectors include pTRE, pCAL-n-EK, pESP-1, pOP13CAT.

[0363] Preferably said vector comprises a nucleic acid sequence which is a regulatory sequence operably linked to said nucleic acid sequence defined herein.

[0364] The term “regulatory sequence” refers to DNA sequences, which are necessary to effect the expression of coding sequences to which they are ligated. The nature of such control sequences differs depending upon the host organism. In prokaryotes, control sequences generally include promoter, ribosomal binding site, and terminators. In eukaryotes generally control sequences include promoters, terminators and, in some instances, enhancers, transactivators or transcription factors. The term “control sequence” is intended to include, at a minimum, all components the presence of which are necessary for expression, and may also include additional advantageous components.

[0365] The term “operably linked” refers to a juxtaposition wherein the components so described are in a relationship permitting them to function in their intended manner. A control sequence “operably linked” to a coding sequence is ligated in such a way that expression of the coding sequence is achieved under conditions compatible with the control sequences. In case the control sequence is a promoter, it is obvious for a skilled person that double-stranded nucleic acid is preferably used.

[0366] Thus, the recited vector is preferably an expression vector. An “expression vector” is a construct that can be used to transform a selected host and provides for expression of a coding sequence in the selected host. Expression vectors can for instance be cloning vectors, binary vectors or integrating vectors. Expression comprises transcription of the nucleic acid molecule preferably into a translatable mRNA. Regulatory elements ensuring expression in prokaryotes and/or eukaryotic cells are well known to those skilled in the art. In the case of eukaryotic cells they comprise normally promoters ensuring initiation of transcription and optionally poly-A signals ensuring termination of transcription and stabilization of the transcript. Possible regulatory elements permitting expression in prokaryotic host cells comprise, e.g., the P_{L}, lac, trp or tac promoter in E. coli, and examples of regulatory elements permitting expression in eukaryotic host cells are the AOX1 or GAL1 promoter in yeast or the CMV-, SV40-, RSV-promoter (Rous sarcoma virus), CMV-enhancer, SV40-enhancer or a globin intron in mammalian and other animal cells.

[0367] Beside elements, which are responsible for the initiation of transcription such regulatory elements may also comprise transcription termination signals, such as the SV40-poly-A site or the tk-poly-A site, downstream of the polynucleotide. Furthermore, depending on the expression system used leader sequences capable of directing the polypeptide to a cellular compartment or secreting it into the medium may be added to the coding sequence of the recited nucleic acid sequence and are well known in the art; see also the appended Examples. The leader sequence(s) is (are) assembled in appropriate phase with translation, initiation and termination sequences, and preferably, a leader sequence capable of directing secretion of translated protein, or a portion thereof, into the periplasmic space or extracellular medium. Optionally, the heterologous sequence can encode a fusion protein including an N-terminal identification peptide imparting desired characteristics, e.g., stabilization or simplified purification of expressed recombinant product; see supra. In this context, suitable expression vectors are known in the art such as Okayama-Berg cDNA expression vector pcDV1 (Pharmacia), pCDM8, pRc/CMV, pcDNA1, pcDNA3 (In-vitrogene), pEF-DHFR, pEF-ADA or pEF-neo (Mack et al. PNAS (1995) 92, 7021-7025 and Raum et al. Cancer Immunol Immunother (2001) 50(3), 141-150) or pSPORT1 (GIBCO BRL).

[0368] Preferably, the expression control sequences will be eukaryotic promoter systems in vectors capable of transforming of transfecting eukaryotic host cells, but control sequences for prokaryotic hosts may also be used. Once the vector has been incorporated into the appropriate host, the host is maintained under conditions suitable for high level expression of the nucleotide sequences, and as desired, the collection and purification of the bispecific single chain antibody molecule of the invention may follow; see, e.g., the appended examples.

[0369] An alternative expression system, which can be used to express a cell cycle interacting protein is an insect system. In one such system, Autographa californica nuclear polyhedrosis virus (AcNPV) is used as a vector to express foreign genes in Spodoptera frugiperda cells or in Trichoplusia larvae. The coding sequence of a recited nucleic acid molecule may be cloned into a nonessential region of the virus, such as the polyhedrin gene, and placed under control of the polyhedrin promoter. Successful insertion of said coding sequence will render the polyhedrin gene inactive and produce recombinant virus lacking coat protein coat. The recombinant viruses are then used to infect S. frugiperda cells or Trichoplusia larvae in which the protein of the invention is expressed (Smith, J. Virol. 46 (1983), 584; Engelhard, Proc. Nat. Acad. Sci. USA 91 (1994), 3224-3227).

[0370] Additional regulatory elements may include transcriptional as well as translational enhancers. Advantageously, the above-described vectors of the invention comprise a selectable and/or scorable marker.

[0371] Selectable marker genes useful for the selection of transformed cells and, e.g., plant tissue and plants are well known to those skilled in the art and comprise, for example, antimetabolite resistance as the basis of selection for dhfr, which confers resistance to methotrexate (Reiss, Plant Physiol. (Life Sci. Adv.) 13 (1994), 143-149); npt, which confers resistance to the aminoglycosides neomycin, kanamycin and paromycin (Herrera-Estrella, EMBO J. 2 (1983), 987-995) and hygro, which confers resistance to hygromycin (Marsh, Gene 32 (1984), 481-485). Additional selectable genes have been described, namely trpB, which allows cells to utilize indole in place of tryptophan; hisD, which allows cells to utilize histinol in place of histidine (Hartman, Proc. Natl. Acad. Sci. USA 85 (1988), 8047); mannose-6-phosphate isomerase which allows cells to utilize mannose (WO 94/20627) and ODC (ornithine decarboxylase) which confers resistance to the ornithine decarboxylase inhibitor, 2-(difluoromethyl)-DL-ornithine, DFMO (McConlogue, 1987, In: Current Communications in Molecular Biology, Cold Spring Harbor Laboratory ed.) or deaminase from Aspergillus terreus which confers resistance to Blasticidin S (Tamura, Biosci. Biotechnol. Biochem. 59 (1995), 2336-2338).

[0372] Useful scorable markers are also known to those skilled in the art and are commercially available. Advantageously, said marker is a gene encoding luciferase (Giacomin, Pl. Sci. 116 (1996), 59-72; Scikantha, J. Bact. 178 (1996), 121), green fluorescent protein (Gerdes, FEBS Lett. 389 (1996), 44-47) or R-glucuronidase (Jefferson, EMBO J. 6 (1987), 3901-3907). This embodiment is particularly useful for simple and rapid screening of cells, tissues and organisms containing a recited vector.

[0373] As described above, the recited nucleic acid molecule can be used alone or as part of a vector to express the bispecific single chain antibody molecule of the invention in cells, for, e.g., purification but also for gene therapy purposes. The nucleic acid molecules or vectors containing the DNA sequence(s) encoding any one of the above described bispecific single chain antibody molecule of the invention is introduced into the cells which in turn produce the polypeptide of interest. Gene therapy, which is based on introducing therapeutic genes into cells by ex-vivo or in-vivo techniques is one of the most important applications of gene transfer. Suitable vectors, methods or gene-delivery systems for in-vitro or in-vivo gene therapy are described in the literature and are known to the person skilled in the art; see, e.g., Giordano, Nature Medicine 2 (1996), 534-539; Schaper, Circ. Res. 79 (1996), 911-919; Anderson, Science 256 (1992), 808-813; Verma, Nature 389 (1994), 239; Isner, Lancet 348 (1996), 370-374; Muhlhauser, Circ. Res. 77 (1995), 1077-1086; Onodera, Blood 91 (1998), 30-36; Verma, Gene Ther. 5 (1998), 692-699; Nabel, Ann. N.Y. Acad. Sci. 811 (1997), 289-292; Verzeletti, Hum. Gene Ther. 9 (1998), 2243-51; Wang, Nature Medicine 2 (1996), 714-716; WO 94/29469; WO 97/00957, U.S. Pat. No. 5,580,859; U.S. Pat. No. 5,589,466; or Schaper, Current Opinion in Biotechnology 7 (1996), 635-640; dos Santos Coura and Nardi Virol J. (2007), 4:99. The recited nucleic acid molecules and vectors may be designed for direct introduction or for introduction via liposomes, or viral vectors (e.g., adenoviral, retroviral) into the cell. Preferably, said cell is a germ line cell, embryonic cell, or egg cell or derived there from, most preferably said cell is a stem cell. An example for an embryonic stem cell can be, inter alia, a stem cell as described in Nagy, Proc. Natl. Acad. Sci. USA 90 (1993), 8424-8428.

[0374] The invention also provides for a host transformed or transfected with a vector of the invention. Said host may be produced by introducing the above described vector of the invention or the above described nucleic acid molecule of the invention into the host. The presence of at least one vector or at least one nucleic acid molecule in the host may mediate the expression of a gene encoding the above described single chain antibody constructs.

[0375] The described nucleic acid molecule or vector of the invention, which is introduced in the host may either integrate into the genome of the host or it may be maintained extrachromosomally.

[0376] The host can be any prokaryote or eukaryotic cell.

[0377] The term “prokaryote” is meant to include all bacteria, which can be transformed or transfected with DNA or RNA molecules for the expression of a protein of the invention. Prokaryotic hosts may include gram negative as well as gram positive bacteria such as, for example, E. coli, S. typhimurium, Serratia marcescens and Bacillus subtilis. The term “eukaryotic” is meant to include yeast, higher plant, insect and preferably mammalian cells. Depending upon the host employed in a recombinant production procedure, the protein encoded by the polynucleotide of the present invention may be glycosylated or may be non-glycosylated. Especially preferred is the use of a plasmid or a virus containing the coding sequence of the bispecific single chain antibody molecule of the invention and genetically fused thereto an N-terminal FLAG-tag and/or C-terminal His-tag. Preferably, the length of said FLAG-tag is about 4 to 8 amino acids, most preferably 8 amino acids. An above described polynucleotide can be used to transform or transfect the host using any of the techniques commonly known to those of ordinary skill in the art. Furthermore, methods for preparing fused, operably linked genes and expressing them in, e.g., mammalian cells and bacteria are well-known in the art (Sambrook, loc cit.). Preferably, said the host is a bacterium or an insect, fungal, plant or animal cell. It is particularly envisaged that the recited host may be a mammalian cell. Particularly preferred host cells comprise CHO cells, COS cells, myeloma cell lines like SP2/0 or NS/0. As illustrated in the appended examples, particularly preferred are CHO-cells as hosts.

[0378] More preferably said host cell is a human cell or human cell line, e.g. per.c6 (Kroos, Biotechnol. Prog., 2003, 19:163-168).

[0379] In a further embodiment, the present invention thus relates to a process for the production of a bispecific single chain antibody molecule of the invention, said process comprising culturing a host of the invention under conditions allowing the expression of the bispecific single chain antibody molecule of the invention and recovering the produced polypeptide from the culture.

[0380] The transformed hosts can be grown in fermentors and cultured according to techniques known in the art to achieve optimal cell growth. The bispecific single chain antibody molecule of the invention can then be isolated from the growth medium, cellular lysates, or cellular membrane fractions. The isolation and purification of the, e.g., microbially expressed bispecific single chain antibody molecules may be by any conventional means such as, for example, preparative chromatographic separations and immunological separations such as those involving the use of monoclonal or polyclonal antibodies directed, e.g., against a tag of the bispecific single chain antibody molecule of the invention or as described in the appended examples. The conditions for the culturing of a host, which allow the expression are known in the art to depend on the host system and the expression system/vector used in such process. The parameters to be modified in order to achieve conditions allowing the expression of a recombinant polypeptide are known in the art. Thus, suitable conditions can be determined by the person skilled in the art in the absence of further inventive input.

[0381] Once expressed, the bispecific single chain antibody molecule of the invention can be purified according to standard procedures of the art, including ammonium sulfate precipitation, affinity columns, column chromatography, gel electrophoresis and the like; see, Scopes, “Protein Purification”, Springer-Verlag, N.Y. (1982). Substantially pure polypeptides of at least about 90 to 95% homogeneity are preferred, and 98 to 99% or more homogeneity are most preferred, for pharmaceutical uses. Once purified, partially or to homogeneity as desired, the bispecific single chain antibody molecule of the invention may then be used therapeutically (including extracorporeally) or in developing and performing assay procedures. Furthermore, examples for methods for the recovery of the bispecific single chain antibody molecule of the invention from a culture are described in detail in the appended examples. The recovery can also be achieved by a method for the isolation of the bispecific single chain antibody molecule of the invention capable of binding to an epitope of human and non-chimpanzee primate CD3 epsilon (CD3ε, the method comprising the steps of:
[0382] (a) contacting the polypeptide(s) with an N-terminal fragment of the extracellular domain of CD3ε of maximal 27 amino acids comprising the amino acid sequence Gln-Asp-Gly-Asn-Glu-Glu-Met-Gly (SEQ ID NO. 341) or Gln-Asp-Gly-Asn-Glu-Glu-Ile-Gly (SEQ ID NO. 342), fixed via its C-terminus to a solid phase;
[0383] (b) eluting the bound polypeptide(s) from said fragment; and
[0384] (c) isolating the polypeptide(s) from the eluate of (b).

[0385] It is preferred that the polypeptide(s) isolated by the above method of the invention are human.

[0386] This method or the isolation of the bispecific single chain antibody molecule of the invention is understood as a method for the isolation of one or more different polypeptides with the same specificity for the fragment of the extracellular domain of CD3ε comprising at its N-terminus the amino acid sequence Gln-Asp-Gly-Asn-Glu-Glu-Met-Gly (SEQ ID NO. 341) or Gln-Asp-Gly-Asn-Glu-Glu-Ile-Gly (SEQ ID NO. 342) from a plurality of polypeptide candidates as well as a method for the purification of a polypeptide from a solution. A non-limiting example for the latter method for the purification of a bispecific single chain antibody molecule from a solution is e.g. the purification of a recombinantly expressed bispecific single chain antibody molecule from a culture supernatant or a preparation from such culture.

[0387] As stated above the fragment used in this method is an N-terminal fragment of the extracellular domain of the primate CD3ε molecule. The amino acid sequence of the extracellular domain of the CD3ε molecule of different species is depicted in SEQ ID NOs: 1, 3, 5 and 7. The two forms of the N-terminal octamer are depicted in SEQ ID NOs: 341 and 342. It is preferred that this N-terminus is freely available for binding of the polypeptides to be identified by the method of the invention. The term “freely available” is understood in the context of the invention as free of additional motives such as a His-tag. The interference of such a His-tag with a binding molecule identified by the method of the invention is described in the appended Examples 6 and 20.

[0388] According to this method said fragment is fixed via its C-terminus to a solid phase. The person skilled in the art will easily and without any inventive ado elect a suitable solid phase support dependent from the used embodiment of the method of the invention. Examples for a solid support comprise but are not limited to matrices like beads (e.g. agarose beads, sepharose beads, polystyrol beads, dextran beads), plates (culture plates or MultiWell plates) as well as chips known e.g. from Biacore®. The selection of the means and methods for the fixation/immobilization of the fragment to said solid support depend on the election of the solid support. A commonly used method for the fixation/immobilization is a coupling via an N-hydroxysuccinimide (NHS) ester. The chemistry underlying this coupling as well as alternative methods for the fixation/immobilization are known to the person skilled in the art, e.g. from Hermanson “Bioconjugate Techniques”, Academic Press, Inc. (1996). For the fixation to/immobilization on chromatographic supports the following means are commonly used: NHS-activated sepharose (e.g. HiTrap-NHS of GE Life Science-Amersham), CnBr-activated sepharose (e.g. GE Life Science-Amersham), NHS-activated dextran beads (Sigma) or activated polymethacrylate. These reagents may also be used in a batch approach. Moreover, dextran beads comprising iron oxide (e.g. available from Miltenyi) may be used in a batch approach. These beads may be used in combination with a magnet for the separation of the beads from a solution. Polypeptides can be immobilized on a Biacore chip (e.g. CM5 chips) by the use of NHS activated carboxymethyldextran. Further examples for an appropriate solid support are amine reactive MultiWell plates (e.g. Nunc Immobilizer™ plates). According to this method said fragment of the extracellular domain of CD3 epsilon can be directly coupled to the solid support or via a stretch of amino acids, which might be a linker or another protein/polypeptide moiety. Alternatively, the extracellular domain of CD3 epsilon can be indirectly coupled via one or more adaptor molecule(s).

[0389] Means and methods for the eluation of a peptide or polypeptide bound to an immobilized epitope are well known in the art. The same holds true for methods for the isolation of the identified polypeptide(s) from the eluate.

[0390] A method for the isolation of one or more different bispecific single chain antibody molecule(s) with the same specificity for the fragment of the extracellular domain of CD3ε comprising at its N-terminus the amino acid sequence Gln-Asp-Gly-Asn-Glu-Glu-X-Gly (with X being Met or Ile) from a plurality of polypeptide candidates may comprise one or more steps of the following methods for the selection of antigen-specific entities:

[0391] CD3ε specific binding domains can be selected from antibody derived repertoires. A phage display library can be constructed based on standard procedures, as for example disclosed in “Phage Display: A Laboratory Manual”; Ed. Barbas, Burton, Scott & Silverman; Cold Spring Harbor Laboratory Press, 2001. The format of the antibody fragments in the antibody library can be scFv, but may generally also be a Fab fragment or even a single domain antibody fragment. For the isolation of antibody fragments naïve antibody fragment libraries may be used. For the selection of potentially low immunogenic binding entities in later therapeutic use, human antibody fragment libraries may be favourable for the direct selection of human antibody fragments. In some cases they may form the basis for synthetic antibody libraries (Knappik et al. J. Mol. Biol. 2000, 296:57 ff). The corresponding format may be Fab, scFv (as described below) or domain antibodies (dAbs, as reviewed in Holt et al., Trends Biotechnol. 2003, 21:484 ff).

[0392] It is also known in the art that in many cases there is no immune human antibody source available against the target antigen. Therefore animals are immunized with the target antigen and the respective antibody libraries isolated from animal tissue as e.g. spleen or PBMCs. The N-terminal fragment may be biotinylated or covalently linked to proteins like KLH or bovine serum albumin (BSA). According to common approaches rodents are used for immunization. Some immune antibody repertoires of non-human origin may be especially favourable for other reasons, e.g. for the presence of single domain antibodies (VHH) derived from cameloid species (as described in Muyldermans, J. Biotechnol. 74:277; De Genst et al. Dev Como Immunol. 2006, 30:187 ff). Therefore a corresponding format of the antibody library may be Fab, scFv (as described below) or single domain antibodies (VHH). In one possible approach ten weeks old F1 mice from balb/c×C57black crossings can be immunized with whole cells e.g. expressing transmembrane EpCAM N-terminally displaying as translational fusion the N-terminal amino acids 1 to 27 of the mature CD3ε chain. Alternatively, mice can be immunized with 1-27 CD3 epsilon-Fc fusion protein (a corresponding approach is described in the appended Example 2). After booster immunization(s), blood samples can be taken and antibody serum titer against the CD3-positive T cells can be tested e.g. in FACS analysis. Usually, serum titers are significantly higher in immunized than in non-immunized animals. Immunized animals may form the basis for the construction of immune antibody libraries. Examples of such libraries comprise phage display libraries. Such libraries may be generally constructed based on standard procedures, as for example disclosed in “Phage Display: A Laboratory Manual”; Ed. Barbas, Burton, Scott & Silverman; Cold Spring Harbor Laboratory Press, 2001.

[0393] The non-human antibodies can also be humanized via phage display due to the generation of more variable antibody libraries that can be subsequently enriched for binders during selection.

[0394] In a phage display approach any one of the pools of phages that displays the antibody libraries forms a basis to select binding entities using the respective antigen as target molecule. The central step in which antigen specific, antigen bound phages are isolated is designated as panning. Due to the display of the antibody fragments on the surface of the phages, this general method is called phage display. One preferred method of selection is the use of small proteins such as the filamentous phage N2 domain translationally fused to the N-terminus of the scFv displayed by the phage. Another display method known in the art, which may be used to isolate binding entities is the ribosome display method (reviewed in Groves & Osbourn, Expert Opin Biol Ther. 2005, 5:125 ff; Lipovsek & Pluckthun, J Immunol Methods 2004, 290:52 ff). In order to demonstrate binding of scFv phage particles to a 1-27 CD3E-Fc fusion protein a phage library carrying the cloned scFv-repertoire can be harvested from the respective culture supernatant by PEG (polyethyleneglycole). ScFv phage particles may be incubated with immobilized CD3ε Fc fusion protein. The immobilized CD3ε Fc fusion protein may be coated to a solid phase. Binding entities can be eluted and the eluate can be used for infection of fresh uninfected bacterial hosts. Bacterial hosts successfully transduced with a phagemid copy, encoding a human scFv-fragment, can be selected again for carbenicillin resistance and subsequently infected with e.g. VCMS 13 helper phage to start the second round of antibody display and in vitro selection. A total of 4 to 5 rounds of selections is carried out, normally. The binding of isolated binding entities can be tested on CD3 epsilon positive Jurkat cells, HPBall cells, PBMCs or transfected eukaryotic cells that carry the N-terminal CD3ε sequence fused to surface displayed EpCAM using a flow cytometric assay (see appended Example 4).

[0395] Preferably, the above method may be a method, wherein the fragment of the extracellular domain of CD3ε consists of one or more fragments of a polypeptide having an amino acid sequence of any one depicted in SEQ ID NOs. 2, 4, 6 or 8. More preferably, said fragment is 8, 9, 10, 11, 12, 13, 14, 15, 16, 17, 18, 19, 20, 21, 22, 23, 24, 25, 26, or 27 amino acid residues in length.

[0396] This method of identification of a bispecific single chain antibody molecule may be a method of screening a plurality of bispecific single chain antibody molecules comprising a cross-species specific binding domain binding to an epitope of human and non-chimpanzee primate CD3ε. Alternatively, the method of identification is a method of purification/isolation of a bispecific single chain antibody molecule comprising a cross-species specific binding domain binding to an epitope of human and non-chimpanzee primate CD3ε.

[0397] Furthermore, the invention provides for a composition comprising a bispecific single chain antibody molecule of the invention or a bispecific single chain antibody as produced by the process disclosed above. Preferably, said composition is a pharmaceutical composition.

[0398] The invention provides also for a bispecific single chain antibody molecule as defined herein, or produced according to the process as defined herein, wherein said bispecific single chain antibody molecule is for use in the prevention, treatment or amelioration of cancer or autoimmune diseases.

[0399] Preferably for a PSCA×CD3 bispecific single chain antibody molecule, said cancer is prostate cancer, bladder cancer or pancreatic cancer.

[0400] For a CD19×CD3 bispecific single chain antibody molecule it is preferred that said cancer is a B-cell malignancy, such as B-NHL (B cell non-Hodgkin Lymphoma), B-ALL (acute lymphoblastic B cell leukemia), B-CLL (chronic lymphocytic B cell leukemia), or Multiple Myeloma (wherein the bispecific single chain antibody molecule of the invention advantageously depletes CD19-positive cancer stem cells/cancer initiating cells). However, the bispecific single chain antibody molecule is also for use in the prevention, treatment or amelioration of B-cell mediated autoimmune diseases or autoimmune diseases with a pathogenic B cell contribution such as rheumatoid arthritis or the depletion of B-cells.

[0401] For a c-MET×CD3 bispecific single chain antibody molecule it is preferred that said cancer is a carcinoma, sarcoma, glioblastoma/astrocytoma, melanoma, mesothelioma, Wilms tumor or a hematopoietic malignancy such as leukemia, lymphoma or multiple myeloma. A comprehensive list of various cancer types which may be treated with the bispecific single chain antibody can be found e.g. in http://www.vai.org/met/.

[0402] For an Endosialin×CD3 bispecific single chain antibody molecule it is preferred that said cancer includes, but is not limited to, carcinomas (breast, kidney, lung, colorectal, colon, pancreas mesothelioma), sarcomas, and neuroectodermal tumors (melanoma, glioma, neuroblastoma).

[0403] For an EpCAM×CD3 bispecific single chain antibody molecule it is preferred that said cancer is epithelial cancer or a minimal residual cancer.

[0404] For a FAPα×CD3 bispecific single chain antibody molecule it is preferred that said cancer is epithelial cancer.

[0405] For a IGF-1R×CD3 bispecific single chain antibody molecule it is preferred that said cancer is bone or soft tissue cancer (e.g. Ewing sarcoma), breast, liver, lung, head and neck, colorectal, prostate, leiomyosarcoma, cervical and endometrial cancer, ovarian, prostate, and pancreatic cancer. Alternatively, the IGF-1R×CD3 bispecific single chain antibody molecule of the invention is also used in the prevention, treatment or amelioration of autoimmune diseases, preferably psoriasis. It is preferred that the bispecific single chain is further comprising suitable formulations of carriers, stabilizers and/or excipients. Moreover, it is preferred that said bispecific single chain antibody molecule is suitable to be administered in combination with an additional drug. Said drug may be a non-proteinaceous compound or a proteinaceous compound and may be administered simultaneously or non-simultaneously with the bispecific single chain antibody molecule as defined herein.

[0406] In accordance with the invention, the term “pharmaceutical composition” relates to a composition for administration to a patient, preferably a human patient. The particular preferred pharmaceutical composition of this invention comprises bispecific single chain antibodies directed against and generated against context-independent CD3 epitopes. Preferably, the pharmaceutical composition comprises suitable formulations of carriers, stabilizers and/or excipients. In a preferred embodiment, the pharmaceutical composition comprises a composition for parenteral, transdermal, intraluminal, intraarterial, intrathecal and/or intranasal administration or by direct injection into tissue. It is in particular envisaged that said composition is administered to a patient via infusion or injection. Administration of the suitable compositions may be effected by different ways, e.g., by intravenous, intraperitoneal, subcutaneous, intramuscular, topical or intradermal administration. In particular, the present invention provides for an uninterrupted administration of the suitable composition. As a non-limiting example, uninterrupted, i.e. continuous administration may be realized by a small pump system worn by the patient for metering the influx of therapeutic agent into the body of the patient. The pharmaceutical composition comprising the bispecific single chain antibodies directed against and generated against context-independent CD3 epitopes of the invention can be administered by using said pump systems. Such pump systems are generally known in the art, and commonly rely on periodic exchange of cartridges containing the therapeutic agent to be infused. When exchanging the cartridge in such a pump system, a temporary interruption of the otherwise uninterrupted flow of therapeutic agent into the body of the patient may ensue. In such a case, the phase of administration prior to cartridge replacement and the phase of administration following cartridge replacement would still be considered within the meaning of the pharmaceutical means and methods of the invention together make up one “uninterrupted administration” of such therapeutic agent.

[0407] The continuous or uninterrupted administration of these bispecific single chain antibodies directed against and generated against context-independent CD3 epitopes of this invention may be intravenuous or subcutaneous by way of a fluid delivery device or small pump system including a fluid driving mechanism for driving fluid out of a reservoir and an actuating mechanism for actuating the driving mechanism. Pump systems for subcutaneous administration may include a needle or a cannula for penetrating the skin of a patient and delivering the suitable composition into the patient's body. Said pump systems may be directly fixed or attached to the skin of the patient independently of a vein, artery or blood vessel, thereby allowing a direct contact between the pump system and the skin of the patient. The pump system can be attached to the skin of the patient for 24 hours up to several days. The pump system may be of small size with a reservoir for small volumes. As a non-limiting example, the volume of the reservoir for the suitable pharmaceutical composition to be administered can be between 0.1 and 50 ml.

[0408] The continuous administration may be transdermal by way of a patch worn on the skin and replaced at intervals. One of skill in the art is aware of patch systems for drug delivery suitable for this purpose. It is of note that transdermal administration is especially amenable to uninterrupted administration, as exchange of a first exhausted patch can advantageously be accomplished simultaneously with the placement of a new, second patch, for example on the surface of the skin immediately adjacent to the first exhausted patch and immediately prior to removal of the first exhausted patch. Issues of flow interruption or power cell failure do not arise.

[0409] The composition of the present invention, comprising in particular bispecific single chain antibodies directed against and generated against context-independent CD3 epitopes may further comprise a pharmaceutically acceptable carrier. Examples of suitable pharmaceutical carriers are well known in the art and include solutions, e.g. phosphate buffered saline solutions, water, emulsions, such as oil/water emulsions, various types of wetting agents, sterile solutions, liposomes, etc. Compositions comprising such carriers can be formulated by well known conventional methods. Formulations can comprise carbohydrates, buffer solutions, amino acids and/or surfactants. Carbohydrates may be non-reducing sugars, preferably trehalose, sucrose, octasulfate, sorbitol or xylitol. Such formulations may be used for continuous administrations which may be intravenuous or subcutaneous with and/or without pump systems. Amino acids may be charged amino acids, preferably lysine, lysine acetate, arginine, glutamate and/or histidine. Surfactants may be detergents, preferably with a molecular weight of >1.2 KD and/or a polyether, preferably with a molecular weight of >3 KD. Non-limiting examples for preferred detergents are Tween 20, Tween 40, Tween 60, Tween 80 or Tween 85. Non-limiting examples for preferred polyethers are PEG 3000, PEG 3350, PEG 4000 or PEG 5000. Buffer systems used in the present invention can have a preferred pH of 5-9 and may comprise citrate, succinate, phosphate, histidine and acetate. The compositions of the present invention can be administered to the subject at a suitable dose which can be determined e.g. by dose escalating studies by administration of increasing doses of the bispecific single chain antibody molecule of the invention exhibiting cross-species specificity described herein to non-chimpanzee primates, for instance macaques. As set forth above, the bispecific single chain antibody molecule of the invention exhibiting cross-species specificity described herein can be advantageously used in identical form in preclinical testing in non-chimpanzee primates and as drug in humans. These compositions can also be administered in combination with other proteinaceous and non-proteinaceous drugs. These drugs may be administered simultaneously with the composition comprising the bispecific single chain antibody molecule of the invention as defined herein or separately before or after administration of said polypeptide in timely defined intervals and doses. The dosage regimen will be determined by the attending physician and clinical factors. As is well known in the medical arts, dosages for any one patient depend upon many factors, including the patient's size, body surface area, age, the particular compound to be administered, sex, time and route of administration, general health, and other drugs being administered concurrently. Preparations for parenteral administration include sterile aqueous or non-aqueous solutions, suspensions, and emulsions. Examples of non-aqueous solvents are propylene glycol, polyethylene glycol, vegetable oils such as olive oil, and injectable organic esters such as ethyl oleate. Aqueous carriers include water, alcoholic/aqueous solutions, emulsions or suspensions, including saline and buffered media. Parenteral vehicles include sodium chloride solution, Ringer's dextrose, dextrose and sodium chloride, lactated Ringer's, or fixed oils. Intravenous vehicles include fluid and nutrient replenishers, electrolyte replenishers (such as those based on Ringer's dextrose), and the like. Preservatives and other additives may also be present such as, for example, antimicrobials, anti-oxidants, chelating agents, inert gases and the like. In addition, the composition of the present invention might comprise proteinaceous carriers, like, e.g., serum albumin or immunoglobulin, preferably of human origin. It is envisaged that the composition of the invention might comprise, in addition to the bispecific single chain antibody molecule of the invention defined herein, further biologically active agents, depending on the intended use of the composition. Such agents might be drugs acting on the gastro-intestinal system, drugs acting as cytostatica, drugs preventing hyperurikemia, drugs inhibiting immunoreactions (e.g. corticosteroids), drugs modulating the inflammatory response, drugs acting on the circulatory system and/or agents such as cytokines known in the art.

[0410] The biological activity of the pharmaceutical composition defined herein can be determined for instance by cytotoxicity assays, as described in the following examples, in WO 99/54440 or by Schlereth et al. (Cancer Immunol. Immunother. 20 (2005), 1-12). “Efficacy” or “in vivo efficacy” as used herein refers to the response to therapy by the pharmaceutical composition of the invention, using e.g. standardized NCI response criteria. The success or in vivo efficacy of the therapy using a pharmaceutical composition of the invention refers to the effectiveness of the composition for its intended purpose, i.e. the ability of the composition to cause its desired effect, i.e. depletion of pathologic cells, e.g. tumor cells. The in vivo efficacy may be monitored by established standard methods for the respective disease entities including, but not limited to white blood cell counts, differentials, Fluorescence Activated Cell Sorting, bone marrow aspiration. In addition, various disease specific clinical chemistry parameters and other established standard methods may be used. Furthermore, computer-aided tomography, X-ray, nuclear magnetic resonance tomography (e.g. for National Cancer Institute-criteria based response assessment [Cheson B D, Horning S J, Coiffier B, Shipp M A, Fisher R I, Connors J M, Lister T A, Vose J, Grillo-Lopez A, Hagenbeek A, Cabanillas F, Klippensten D, Hiddemann W, Castellino R, Harris N L, Armitage J O, Carter W, Hoppe R, Canellos G P. Report of an international workshop to standardize response criteria for non-Hodgkin's lymphomas. NCI Sponsored International Working Group. J Clin Oncol. 1999 April; 17(4):1244]), positron-emission tomography scanning, white blood cell counts, differentials, Fluorescence Activated Cell Sorting, bone marrow aspiration, lymph node biopsies/histologies, and various cancer specific clinical chemistry parameters (e.g. lactate dehydrogenase) and other established standard methods may be used.

[0411] Another major challenge in the development of drugs such as the pharmaceutical composition of the invention is the predictable modulation of pharmacokinetic properties. To this end, a pharmacokinetic profile of the drug candidate, i.e. a profile of the pharmacokinetic parameters that effect the ability of a particular drug to treat a given condition, is established. Pharmacokinetic parameters of the drug influencing the ability of a drug for treating a certain disease entity include, but are not limited to: half-life, volume of distribution, hepatic first-pass metabolism and the degree of blood serum binding. The efficacy of a given drug agent can be influenced by each of the parameters mentioned above.

[0412] “Half-life” means the time where 50% of an administered drug are eliminated through biological processes, e.g. metabolism, excretion, etc.

[0413] By “hepatic first-pass metabolism” is meant the propensity of a drug to be metabolized upon first contact with the liver, i.e. during its first pass through the liver.

[0414] “Volume of distribution” means the degree of retention of a drug throughout the various compartments of the body, like e.g. intracellular and extracellular spaces, tissues and organs, etc. and the distribution of the drug within these compartments.

[0415] “Degree of blood serum binding” means the propensity of a drug to interact with and bind to blood serum proteins, such as albumin, leading to a reduction or loss of biological activity of the drug.

[0416] Pharmacokinetic parameters also include bioavailability, lag time (Tlag), Tmax, absorption rates, more onset and/or Cmax for a given amount of drug administered.

[0417] “Bioavailability” means the amount of a drug in the blood compartment.

[0418] “Lag time” means the time delay between the administration of the drug and its detection and measurability in blood or plasma.

[0419] “Tmax” is the time after which maximal blood concentration of the drug is reached, and “Cmax” is the blood concentration maximally obtained with a given drug. The time to reach a blood or tissue concentration of the drug which is required for its biological effect is influenced by all parameters. Pharmacokinetik parameters of bispecific single chain antibodies exhibiting cross-species specificity, which may be determined in preclinical animal testing in non-chimpanzee primates as outlined above are also set forth e.g. in the publication by Schlereth et al. (Cancer Immunol. Immunother. 20 (2005), 1-12).

[0420] The term “toxicity” as used herein refers to the toxic effects of a drug manifested in adverse events or severe adverse events. These side events might refer to a lack of tolerability of the drug in general and/or a lack of local tolerance after administration. Toxicity could also include teratogenic or carcinogenic effects caused by the drug.

[0421] The term “safety”, “in vivo safety” or “tolerability” as used herein defines the administration of a drug without inducing severe adverse events directly after administration (local tolerance) and during a longer period of application of the drug.

[0422] “Safety”, “in vivo safety” or “tolerability” can be evaluated e.g. at regular intervals during the treatment and follow-up period. Measurements include clinical evaluation, e.g. organ manifestations, and screening of laboratory abnormalities. Clinical evaluation may be carried out and deviating to normal findings recorded/coded according to NCI-CTC and/or MedDRA standards. Organ manifestations may include criteria such as allergy/immunology, blood/bone marrow, cardiac arrhythmia, coagulation and the like, as set forth e.g. in the Common Terminology Criteria for adverse events v3.0 (CTCAE). Laboratory parameters which may be tested include for instance haematology, clinical chemistry, coagulation profile and urine analysis and examination of other body fluids such as serum, plasma, lymphoid or spinal fluid, liquor and the like. Safety can thus be assessed e.g. by physical examination, imaging techniques (i.e. ultrasound, x-ray, CT scans, Magnetic Resonance Imaging (MRI), other measures with technical devices (i.e. electrocardiogram), vital signs, by measuring laboratory parameters and recording adverse events. For example, adverse events in non-chimpanzee primates in the uses and methods according to the invention may be examined by histopathological and/or histochemical methods.

[0423] The term “effective and non-toxic dose” as used herein refers to a tolerable dose of the bispecific single chain antibody as defined herein which is high enough to cause depletion of pathologic cells, tumor elimination, tumor shrinkage or stabilization of disease without or essentially without major toxic effects. Such effective and non-toxic doses may be determined e.g. by dose escalation studies described in the art and should be below the dose inducing severe adverse side events (dose limiting toxicity, DLT).

[0424] The above terms are also referred to e.g. in the Preclinical safety evaluation of biotechnology-derived pharmaceuticals S6; ICH Harmonised Tripartite Guideline; ICH Steering Committee meeting on Jul. 16, 1997.

[0425] Moreover, the invention relates to a pharmaceutical composition comprising a bispecific single chain antibody molecule of this invention or produced according to the process according to the invention for the prevention, treatment or amelioration of cancer or autoimmune diseases.

[0426] Preferably, said cancer is for a PSCA×CD3 bispecific single chain antibody molecule prostate cancer, bladder cancer or pancreatic cancer.

[0427] Preferably, said cancer is for a CD19×CD3 bispecific single chain antibody molecule a B-cell malignancy such as non-Hodgkin Lymphoma, B-cell mediated autoimmune diseases or the depletion of B-cells.

[0428] Preferably, said cancer is for a c-MET×CD3 bispecific single chain antibody molecule is a carcinoma, sarcoma, glioblastoma/astrocytoma, melanoma, mesothelioma, Wilms tumor or a hematopoietic malignancy such as leukemia, lymphoma or multiple myeloma.

[0429] Preferably, said cancer is for an Endosialin×CD3 bispecific single chain antibody molecule a carcinoma (breast, kidney, lung, colorectal, colon, pancreas mesothelioma), a sarcoma, or a neuroectodermal tumor (melanoma, glioma, neuroblastoma).

[0430] Preferably, said cancer is for an EpCAM×CD3 bispecific single chain antibody molecule epithelial cancer or a minimal residual cancer.

[0431] Preferably, said cancer is for a FAPα×CD3 bispecific single chain antibody molecule epithelial cancer.

[0432] Preferably, said cancer is for a an IGF-1R×CD3 bispecific single chain antibody molecule bone or soft tissue cancer (e.g. Ewing sarcoma), breast, liver, lung, head and neck, colorectal, prostate, leiomyosarcoma, cervical and endometrial cancer, ovarian, prostate, and pancreatic cancer. Alternatively, the IGF-1R×CD3 bispecific single chain antibody molecule/polypeptide as defined herein above is also used in the prevention, treatment or amelioration of autoimmune diseases, preferably psoriasis.

[0433] Preferably, said pharmaceutical composition further comprises suitable formulations of carriers, stabilizers and/or excipients.

[0434] A further aspect of the invention relates to a use of a bispecific single chain antibody molecule/polypeptide as defined herein above or produced according to a process defined herein above, for the preparation of a pharmaceutical composition for the prevention, treatment or amelioration of a disease. Preferably, said disease is cancer or autoimmune diseases.

[0435] More preferably for a PSCA×CD3 bispecific single chain antibody molecule/polypeptide as defined herein above, said cancer is prostate cancer, bladder cancer or pancreatic cancer.

[0436] More preferably for a CD19×CD3 bispecific single chain antibody molecule/polypeptide as defined herein above, said cancer is a B-cell malignancy such as non-Hodgkin Lymphoma, B-cell mediated autoimmune diseases or the depletion of B-cells.

[0437] More preferably for a c-MET×CD3 bispecific single chain antibody molecule/polypeptide as defined herein above, said cancer is a carcinoma, sarcoma, glioblastoma/astrocytoma, melanoma, mesothelioma, Wilms tumor or a hematopoietic malignancy such as leukemia, lymphoma or multiple myeloma.

[0438] More preferably for an Endosialin×CD3 bispecific single chain antibody molecule/polypeptide as defined herein above, said cancer is a carcinoma (breast, kidney, lung, colorectal, colon, pancreas mesothelioma), a sarcoma, or a neuroectodermal tumor (melanoma, glioma, neuroblastoma).

[0439] More preferably for an EpCAM×CD3 bispecific single chain antibody molecule/polypeptide as defined herein above, said cancer is epithelial cancer or a minimal residual cancer.

[0440] More preferably for a FAPα×CD3 bispecific single chain antibody molecule/polypeptide as defined herein above, said cancer is epithelial cancer.

[0441] More preferably for an IGF-1R×CD3 bispecific single chain antibody molecule/polypeptide as defined herein above, said cancer is bone or soft tissue cancer (e.g. Ewing sarcoma), breast, liver, lung, head and neck, colorectal, prostate, leiomyosarcoma, cervical and endometrial cancer, ovarian, prostate, and pancreatic cancer. Alternatively, the IGF-1R×CD3 bispecific single chain antibody molecule/polypeptide as defined herein above is also used in the prevention, treatment or amelioration of autoimmune diseases, preferably psoriasis.

[0442] In another preferred embodiment of use of the bispecific single chain antibody molecule of the invention said pharmaceutical composition is suitable to be administered in combination with an additional drug, i.e. as part of a co-therapy. In said co-therapy, an active agent may be optionally included in the same pharmaceutical composition as the bispecific single chain antibody molecule of the invention, or may be included in a separate pharmaceutical composition. In this latter case, said separate pharmaceutical composition is suitable for administration prior to, simultaneously as or following administration of said pharmaceutical composition comprising the bispecific single chain antibody molecule of the invention. The additional drug or pharmaceutical composition may be a non-proteinaceous compound or a proteinaceous compound. In the case that the additional drug is a proteinaceous compound, it is advantageous that the proteinaceous compound be capable of providing an activation signal for immune effector cells.

[0443] Preferably, said proteinaceous compound or non-proteinaceous compound may be administered simultaneously or non-simultaneously with the bispecific single chain antibody molecule of the invention, a nucleic acid molecule as defined hereinabove, a vector as defined as defined hereinabove, or a host as defined as defined hereinabove.

[0444] Another aspect of the invention relates to a method for the prevention, treatment or amelioration of a disease in a subject in the need thereof, said method comprising the step of administration of an effective amount of a pharmaceutical composition of the invention. Preferably, said disease is cancer or autoimmune diseases.

[0445] More preferably for a PSCA×CD3 bispecific single chain antibody molecule/polypeptide as defined herein above-said cancer is prostate cancer, bladder cancer or pancreatic cancer.

[0446] More preferably for a C D19×CD3 bispecific single chain antibody molecule/polypeptide as defined herein above, said cancer is a B-cell malignancy such as non-Hodgkin Lymphoma, B-cell mediated autoimmune diseases or the depletion of B-cells.

[0447] More preferably for a c-MET×CD3 bispecific bispecific single chain antibody molecule/polypeptide as defined herein above, said cancer is a carcinoma, sarcoma, glioblastoma/astrocytoma, melanoma, mesothelioma, Wilms tumor or a hematopoietic malignancy such as leukemia, lymphoma or multiple myeloma.

[0448] More preferably for an Endosialin×CD3 bispecific bispecific single chain antibody molecule/polypeptide as defined herein above, said cancer is a carcinoma (breast, kidney, lung, colorectal, colon, pancreas mesothelioma), a sarcoma, or a neuroectodermal tumor (melanoma, glioma, neuroblastoma).

[0449] More preferably for an EpCAM×CD3 bispecific single chain antibody molecule/polypeptide as defined herein above, said cancer is epithelial cancer or a minimal residual cancer.

[0450] More preferably for a FAPα×CD3 bispecific single chain antibody molecule/polypeptide as defined herein above, said cancer is epithelial cancer More preferably for an IGF-1R×CD3 bispecific single chain antibody molecule/polypeptide as defined herein above, said cancer is bone or soft tissue cancer (e.g. Ewing sarcoma), breast, liver, lung, head and neck, colorectal, prostate, leiomyosarcoma, cervical and endometrial cancer, ovarian, prostate, and pancreatic cancer. Alternatively, the IGF-1R×CD3 bispecific single chain antibody molecule/polypeptide as defined herein above is also used in the prevention, treatment or amelioration of autoimmune diseases, preferably psoriasis.

[0451] In another preferred embodiment of the method of the invention said pharmaceutical composition is suitable to be administered in combination with an additional drug, i.e. as part of a co-therapy. In said co-therapy, an active agent may be optionally included in the same pharmaceutical composition as the bispecific single chain antibody molecule of the invention, or may be included in a separate pharmaceutical composition. In this latter case, said separate pharmaceutical composition is suitable for administration prior to, simultaneously as or following administration of said pharmaceutical composition comprising the bispecific single chain antibody molecule of the invention. The additional drug or pharmaceutical composition may be a non-proteinaceous compound or a proteinaceous compound. In the case that the additional drug is a proteinaceous compound, it is advantageous that the proteinaceous compound be capable of providing an activation signal for immune effector cells.

[0452] Preferably, said proteinaceous compound or non-proteinaceous compound may be administered simultaneously or non-simultaneously with the bispecific single chain antibody molecule of the invention, a nucleic acid molecule as defined hereinabove, a vector as defined as defined hereinabove, or a host as defined as defined hereinabove.

[0453] It is preferred for the above described method of the invention that said subject is a human.

[0454] In a further aspect, the invention relates to a kit comprising a bispecific single chain antibody molecule of the invention, a nucleic acid molecule of the invention, a vector of the invention, or a host of the invention.

[0455] These and other embodiments are disclosed and encompassed by the description and Examples of the present invention. Recombinant techniques and methods in immunology are described e.g. in Sambrook et al. Molecular Cloning: A Laboratory Manual; Cold Spring Harbor Laboratory Press, 3^{rd} edition 2001; Lefkovits; Immunology Methods Manual; The Comprehensive Sourcebook of Techniques; Academic Press, 1997; Golemis; Protein-Protein Interactions: A Molecular Cloning Manual; Cold Spring Laboratory Press, 2002. Further literature concerning any one of the antibodies, methods, uses and compounds to be employed in accordance with the present invention may be retrieved from public libraries and databases, using for example electronic devices. For example, the public database “Medline”, available on the Internet, may be utilized, for example under http://www.ncbi.nlm.nih.gov/PubMed/medline.html. Further databases and addresses such as http://www.ncbi.nlm.nih.gov/ or listed at the EMBL-services homepage under http://www.embl.de/services/index.html are known to the person skilled in the art and can also be obtained using, e.g., http://www.google.com.

[0456] The figures show:

[0457] FIG. 1

[0458] Fusion of the N-terminal amino acids 1-27 of primate CD3 epsilon to a heterologous soluble protein.

[0459] FIG. 2

[0460] The figure shows the average absorption values of quadruplicate samples measured in an ELISA assay detecting the presence of a construct consisting of the N-terminal amino acids 1-27 of the mature human CD3 epsilon chain fused to the hinge and Fc gamma portion of human IgG1 and a C-terminal 6 Histidine tag in a supernatant of transiently transfected 293 cells. The first column labeled “27 aa huCD3E” shows the average absorption value for the construct, the second column labeled “irrel. SN” shows the average value for a supernatant of 293 cells transfected with an irrelevant construct as negative control. The comparison of the values obtained for the construct with the values obtained for the negative control clearly demonstrates the presence of the recombinant construct.

[0461] FIG. 3

[0462] The figure shows the average absorption values of quadruplicate samples measured in an ELISA assay detecting the binding of the cross species specific anti-CD3 binding molecules in form of crude preparations of periplasmatically expressed single-chain antibodies to a construct comprising the N-terminal 1-27 amino acids of the mature human CD3 epsilon chain fused to the hinge and Fc gamma portion of human IgG1 and a C-terminal His6 tag. The columns show from left to right the average absorption values for the specificities designated as A2J HLP, I2C HLP E2M HLP, F70 HLP, G4H HLP, H2C HLP, E1L HLP, F12Q HLP, F6A HLP and H1E HLP. The rightmost column labelled “neg. contr.” shows the average absorption value for the single-chain preparation of a murine anti-human CD3 antibody as negative control. The comparison of the values obtained for the anti-CD3 specificities with the values obtained for the negative control clearly demonstrates the strong binding of the anti-CD3 specificities to the N-terminal 1-27 amino acids of the mature human CD3 epsilon chain.

[0463] FIG. 4

[0464] Fusion of the N-terminal amino acids 1-27 of primate CD3 epsilon to a heterologous membrane bound protein.

[0465] FIG. 5

[0466] Histogram overlays of different transfectants tested in a FACS assay detecting the presence of recombinant transmembrane fusion proteins consisting of cynomolgus EpCAM and the N-terminal 1-27 amino acids of the human, marmoset, tamarin, squirrel monkey and domestic swine CD3 epsilon chain respectively. The histogram overlays from left to right and top to bottom show the results for the transfectants expressing the constructs comprising the human 27 mer, marmoset 27 mer, tamarin 27 mer, squirrel monkey 27 mer and swine 27 mer respectively. In the individual overlays the thin line represents a sample incubated with PBS with 2% FCS instead of anti-Flag M2 antibody as negative control and the bold line shows a sample incubated with the anti-Flag M2 antibody. For each construct the overlay of the histograms shows binding of the anti-Flag M2 antibody to the transfectants, which clearly demonstrates the expression of the recombinant constructs on the transfectants.

[0467] FIG. 6

[0468] Histogram overlays of different transfectants tested in a FACS assay detecting the binding of the cross-species specific anti-CD3 binding molecules in form of crude preparations of periplasmatically expressed single-chain antibodies to the N-terminal amino acids 1-27 of the human, marmoset, tamarin and squirrel monkey CD3 epsilon chain respectively fused to cynomolgus EpCAM.

[0469] FIG. 6A:

[0470] The histogram overlays from left to right and top to bottom show the results for the transfectants expressing the 1-27 CD3-EpCAM comprising the human 27 mer tested with the CD3 specific binding molecules designated H2C HLP, F12Q HLP, E2M HLP and G4H HLP respectively.

[0471] FIG. 6B:

[0472] The histogram overlays from left to right and top to bottom show the results for the transfectants expressing the 1-27 CD3-EpCAM comprising the marmoset 27 mer tested with the CD3 specific binding molecules designated H2C HLP, F12Q HLP, E2M HLP and G4H HLP respectively.

[0473] FIG. 6C:

[0474] The histogram overlays from left to right and top to bottom show the results for the transfectants expressing the 1-27 CD3-EpCAM comprising the tamarin 27 mer tested with the CD3 specific binding molecules designated H2C HLP, F12Q HLP, E2M HLP and G4H HLP respectively.

[0475] FIG. 6D:

[0476] The histogram overlays from left to right and top to bottom show the results for the transfectants expressing the 1-27 CD3-EpCAM comprising the squirrel monkey 27 mer tested with the CD3 specific binding molecules designated H2C HLP, F12Q HLP, E2M HLP and G4H HLP respectively.

[0477] FIG. 6E:

[0478] The histogram overlays from left to right and top to bottom show the results for the transfectants expressing the 1-27 CD3-EpCAM comprising the swine 27 mer tested with the CD3 specific binding molecules designated H2C HLP, F12Q HLP, E2M HLP and G4H HLP respectively.

[0479] In the individual overlays the thin line represents a sample incubated with a single-chain preparation of a murine anti-human CD3-antibody as negative control and the bold line shows a sample incubated with the respective anti-CD3 binding molecules indicated. Considering the lack of binding to the swine 27 mer transfectants and the expression levels of the constructs shown in FIG. 5 the overlays of the histograms show specific and strong binding of the tested anti-CD3 specificities of the fully cross-species specific human bispecific single chain antibodies to cells expressing the recombinant transmembrane fusion proteins comprising the N-terminal amino acids 1-27 of the human, marmoset, tamarin and squirrel monkey CD3 epsilon chain respectively fused to cynomolgus EpCAM and show therefore multi primate cross-species specificity of the anti-CD3 binding molecules.

[0480] FIG. 7

[0481] FACS assay for detection of human CD3 epsilon on transfected murine EL4 T cells. Graphical analysis shows an overlay of histograms. The bold line shows transfected cells incubated with the anti-human CD3 antibody UCHT-1. The thin line represents cells incubated with a mouse IgG1 isotype control. Binding of the anti CD3 antibody UCHT1 clearly shows expression of the human CD3 epsilon chain on the cell surface of transfected murine EL4 T cells.

[0482] FIG. 8

[0483] Binding of cross-species specific anti CD3 antibodies to alanine-mutants in an alanine scanning experiment. In the individual Figures the columns show from left to right the calculated binding values in arbitrary units in logarithmic scale for the wild-type transfectant (WT) and for all alanine-mutants from the position 1 to 27. The binding values are calculated using the following formula:

$$value\_Sample ( x , y ) = \frac{Sample ( x , y ) - neg\_Contr . ( x )}{\begin{matrix}( U C H T - 1 ( x ) - neg\_Contr . ( x ) ) * \\ \frac{WT ( y ) - neg\_Contr . ( wt )}{U C H T - 1 ( wt ) - neg\_Contr . ( wt )}\end{matrix}}$$

[0484] In this equation value_Sample means the value in arbitrary units of binding depicting the degree of binding of a specific anti-CD3 antibody to a specific alanine-mutant as shown in the Figure, Sample means the geometric mean fluorescence value obtained for a specific anti-CD3 antibody assayed on a specific alanine-scanning transfectant, neg_Contr. means the geometric mean fluorescence value obtained for the negative control assayed on a specific alanine-mutant, UCHT-1 means the geometric mean fluorescence value obtained for the UCHT-1 antibody assayed on a specific alanine-mutant, WT means the geometric mean fluorescence value obtained for a specific anti-CD3 antibody assayed on the wild-type transfectant, x specifies the respective transfectant, y specifies the respective anti-CD3 antibody and wt specifies that the respective transfectant is the wild-type. Individual alanine-mutant positions are labelled with the single letter code of the wild-type amino acid and the number of the position.

[0485] FIG. 8A:

[0486] The figure shows the results for cross-species specific anti CD3 antibody A2J HLP expressed as chimeric IgG molecule. Reduced binding activity is observed for mutations to alanine at position 4 (asparagine), at position 23 (threonine) and at position 25 (isoleucine). Complete loss of binding is observed for mutations to alanine at position 1 (glutamine), at position 2 (aspartate), at position 3 (glycine) and at position 5 (glutamate).

[0487] FIG. 8B:

[0488] The figure shows the results for cross-species specific anti CD3 antibody E2M HLP, expressed as chimeric IgG molecule. Reduced binding activity is observed for mutations to alanine at position 4 (asparagine), at position 23 (threonine) and at position 25 (isoleucine). Complete loss of binding is observed for mutations to alanine at position 1 (glutamine), at position 2 (aspartate), at position 3 (glycine) and at position 5 (glutamate).

[0489] FIG. 8C:

[0490] The figure shows the results for cross-species specific anti CD3 antibody H2C HLP, expressed as chimeric IgG molecule. Reduced binding activity is observed for mutations to alanine at position 4 (asparagine). Complete loss of binding is observed for mutations to alanine glutamine at position 1 (glutamine), at position 2 (aspartate), at position 3 (glycine) and at position 5 (glutamate).

[0491] FIG. 8D:

[0492] shows the results for cross-species specific anti CD3 antibody F12Q HLP, tested as periplasmatically expressed single-chain antibody. Complete loss of binding is observed for mutations to alanine at position 1 (glutamine), at position 2 (aspartate), at position 3 (glycine) and at position 5 (glutamate).

[0493] FIG. 9

[0494] FACS assay detecting the binding of the cross-species specific anti-CD3 binding molecule H2C HLP to human CD3 with and without N-terminal His6 tag.

[0495] Histogram overlays are performed of the EL4 cell line transfected with wild-type human CD3 epsilon chain (left histogram) or the human CD3 epsilon chain with N-terminal His 6 tag (right histogram) tested in a FACS assay detecting the binding of cross-species specific binding molecule H2C HLP. Samples are incubated with an appropriate isotype control as negative control (thin line), anti-human CD3 antibody UCHT-1 as positive control (dotted line) and cross-species specific anti-CD3 antibody H2C HLP in form of a chimeric IgG molecule (bold line).

[0496] Histogram overlays show comparable binding of the UCHT-1 antibody to both transfectants as compared to the isotype control demonstrating expression of both recombinant constructs. Histogram overlays also show binding of the anti-CD3 binding molecule H2C HLP only to the wild-type human CD3 epsilon chain but not to the His6-human CD3 epsilon chain. These results demonstrate that a free N-terminus is essential for binding of the cross-species specific anti-CD3 binding molecule H2C HLP.

[0497] FIG. 10

[0498] FACS binding analysis of designated cross-species specific bispecific single chain constructs to CHO cells transfected with the human MCSP D3, human CD3+ T cell line HPB-ALL, CHO cells transfected with cynomolgus MCSP D3 and a macaque T cell line 4119 LnPx. The FACS staining is performed as described in Example 10. The thick line represents cells incubated with 2 μg/ml purified protein that are subsequently incubated with the anti-his antibody and the PE labeled detection antibody. The thin histogram line reflects the negative control: cells only incubated with the anti-his antibody and the detection antibody.

[0499] FIG. 11

[0500] FACS binding analysis of designated cross-species specific bispecific single chain constructs CHO cells transfected with the human MCSP D3, human CD3+ T cell line HPB-ALL, CHO cells transfected with cynomolgus MCSP D3 and a macaque T cell line 4119 LnPx. The FACS staining is performed as described in Example 10. The thick line represents cells incubated with 2 μg/ml purified protein that are subsequently incubated with the anti-his antibody and the PE labeled detection antibody. The thin histogram line reflects the negative control: cells only incubated with the anti-his antibody and the detection antibody.

[0501] FIG. 12

[0502] FACS binding analysis of designated cross-species specific bispecific single chain constructs CHO cells transfected with the human MCSP D3, human CD3+ T cell line HPB-ALL, CHO cells transfected with cynomolgus MCSP D3 and a macaque T cell line 4119 LnPx. The FACS staining is performed as described in Example 10. The thick line represents cells incubated with 2 μg/ml purified monomeric protein that are subsequently incubated with the anti-his antibody and the PE labeled detection antibody. The thin histogram line reflects the negative control: cells only incubated with the anti-his antibody and the detection antibody.

[0503] FIG. 13

[0504] Cytotoxicity activity induced by designated cross-species specific MCSP specific single chain constructs redirected to indicated target cell lines. A) Stimulated CD4-/CD56-human PBMCs are used as effector cells, CHO cells transfected with human MCSP D3 as target cells. B) The macaque T cell line 4119 LnPx are used as effector cells, CHO cells transfected with cynomolgus MCSP D3 as target cells. The assay is performed as described in Example 11.

[0505] FIG. 14

[0506] Cytotoxicity activity induced by designated cross-species specific MCSP specific single chain constructs redirected to indicated target cell lines. A) and B) The macaque T cell line 4119 LnPx are used as effector cells, CHO cells transfected with cynomolgus MCSP D3 as target cells. The assay is performed as described in Example 11.

[0507] FIG. 15

[0508] Cytotoxicity activity induced by designated cross-species specific MCSP specific single chain constructs redirected to indicated target cell lines. A) and B) Stimulated CD4-/CD56-human PBMCs are used as effector cells, CHO cells transfected with human MCSP D3 as target cells. The assay is performed as described in Example

[0509] FIG. 16

[0510] Cytotoxicity activity induced by designated cross-species specific MCSP specific single chain constructs redirected to indicated target cell lines. A) Stimulated CD4-/CD56-human PBMCs are used as effector cells, CHO cells transfected with human MCSP D3 as target cells. B) The macaque T cell line 4119 LnPx are used as effector cells, CHO cells transfected with cynomolgus MCSP D3 as target cells. The assay is performed as described in Example 11.

[0511] FIG. 17

[0512] Cytotoxicity activity induced by designated cross-species specific MCSP specific single chain constructs redirected to indicated target cell lines. A) Stimulated CD4-/CD56-human PBMCs are used as effector cells, CHO cells transfected with human MCSP D3 as target cells. B) The macaque T cell line 4119 LnPx are used as effector cells, CHO cells transfected with cynomolgus MCSP D3 as target cells. The assay is performed as described in Example 11.

[0513] FIG. 18

[0514] Plasma stability of MCSP and CD3 cross-species specific bispecific single chain antibodies tested by the measurement of cytotoxicity activity induced by samples of the designated single chain constructs incubated with 50% human plasma at 37° C. and 4° C. for 24 hours respectively or with addition of 50% human plasma immediately prior to cytotoxicity testing or without addition of plasma. CHO cells transfected with human MCSP are used as target cell line and stimulated CD4-/CD56-human PBMCs are used as effector cells. The assay is performed as described in Example 12.

[0515] FIG. 19

[0516] Initial drop and recovery (i.e. redistribution) of absolute T cell counts (open squares), in peripheral blood of B-NHL patients (patent numbers 1, 7, 23, 30, 31, and 33 of Table 4), who had essentially no circulating CD19-positive target B cells (filled triangles), during the starting phase of intravenous infusion with the CD3 binding molecule CD19×CD3 recognizing a conventional context dependent CD3 epitope. Absolute cell counts are given in 1000 cells per microliter blood. The first data point shows baseline counts immediately prior to the start of infusion. The CD19×CD3 dose is given in parentheses beside the patient number.

[0517] FIG. 20

[0518] (A) Repeated T cell redistribution (open squares) in B-NHL patient #19 (Table 4) who had no circulating CD19-positive target B cells (filled triangles) and developed CNS symptoms under continuous intravenous infusion with CD19×CD3 at a starting dose of 5 μg/m²/24 h for one day followed by a sudden dose increase to 15 μg/m²/24 h. Absolute cell counts are given in 1000 cells per microliter blood. The first data point shows baseline counts immediately prior to the start of infusion. After recovery of circulating T cells from the first episode of redistribution triggered by the treatment start at 5 μg/m²/24 h the stepwise dose increase from 5 to 15 μg/m²/24 h triggered a second episode of T cell redistribution that was associated with the development of CNS symptoms dominated by confusion and disorientation.

[0519] (B) Repeated T cell redistribution in a B-NHL patient, who developed CNS symptoms under repeated intravenous bolus infusion with CD19×CD3 at 1.5 μg/m². Absolute cell counts are given in 1000 cells per microliter blood. The infusion time for each bolus administration was 2 to 4 hours. Vertical arrows indicate the start of bolus infusions.

[0520] Data points at the beginning of each bolus administration show the T cell counts immediately prior to start of bolus infusion. Each bolus infusion triggered an episode of T cell redistribution followed by recovery of the T cell counts prior to the next bolus infusion. Finally the third episode of T cell redistribution was associated with the development of CNS symptoms in this patient.

[0521] FIG. 21

[0522] Complex T cell redistribution pattern (open squares) in B-NHL patient #20 (Table 4) without circulating CD19-positive target B cells (filled triangles), during ramp initiation of the CD19×CD3 infusion i.e. even gradual increase of flow-rate from almost zero to 15 μg/m²/24 h during the first 24 hours of treatment. Absolute cell counts are given in 1000 cells per microliter blood. The first data point shows baseline counts immediately prior to the start of infusion. The CD19×CD3 dose is given in parentheses beside the patient number. T cells reappearing in the circulating blood after the initial redistribution triggered by the first exposure to CD19×CD3 are partially induced to redisappear from circulating blood again by still increasing levels of CD19×CD3 during the ramp phase.

[0523] FIG. 22

[0524] T and B cell counts during treatment with CD19×CD3 of B-NHL patient #13 (Table 4) who had a significant number of circulating CD19-positive target B (lymphoma) cells (filled triangles). Absolute cell counts are given in 1000 cells per microliter blood. The first data point shows baseline counts immediately prior to the start of infusion. The CD19×CD3 dose is given in parentheses beside the patient number. T cells (open squares) disappear completely from the circulation upon start of CD19×CD3 infusion and do not reappear until the circulating CD19-positive B (lymphoma) cells (filled triangles) are depleted from the peripheral blood.

[0525] FIG. 23

[0526] Repeated T cell redistribution (open squares) in B-NHL patient #24 (Table 4), who had essentially no circulating CD19-positive target B cells (filled triangles) and developed CNS symptoms upon initiation of CD19×CD3 infusion without additional HSA as required for stabilisation of the drug (upper panel). After first recovery of circulating T cells from initial redistribution the uneven drug flow due to the lack of stabilizing HSA triggered a second episode of T cell redistribution that was associated with the development of CNS symptoms dominated by confusion and disorientation. When the same patient was restarted correctly with CD19×CD3 solution containing additional HSA for drug stabilisation, no repeated T cell redistribution was observed (lower panel) and the patient did not again develop any CNS symptoms. Absolute cell counts are given in 1000 cells per microliter blood. The first data point shows baseline counts immediately prior to the start of infusion. The CD19×CD3 dose is given in parentheses beside the patient number.

[0527] FIG. 24

[0528] Model of T cell adhesion to endothelial cells induced by monovalent binding to context dependent CD3 epitopes. Monovalent interaction of a conventional CD3 binding molecule to its context dependent epitope on CD3 epsilon can lead to an allosteric change in the conformation of CD3 followed by the recruitment of Nck2 to the cytoplasmic domain of CD3 epsilon (Gil et al. (2002) Cell 109: 901). As Nck2 is directly linked to integrins via PINCH and ILK (Legate et al. (2006) Nat Rev Mol Cell Biol 7: 20), recruitment of Nck2 to the cytoplasmic domain of CD3 epsilon following an allosteric change in the conformation of CD3 through binding of a conventional CD3 binding molecule (like the CD19×CD3 of example 13) to its context dependent epitope on CD3 epsilon, can increase the adhesiveness of T cells to endothelial cells by transiently switching integrins on the T cell surface into their more adhesive isoform via inside-out-signalling.

[0529] FIG. 25

[0530] Cytotoxic activity of CD33-AF5 VH-VL×I2C VH-VL test material used for the in vivo study in cynomolgus monkeys as described in Example 14. Specific lysis of CD33-positive target cells was determined in a standard ⁵¹Chromium release assay at increasing concentrations of CD33-AF5 VH-VL×I2C VH-VL. Assay duration was 18 hours. The macaque T cell line 4119 LnPx was used as source of effector cells. CHO cells transfected with cynomolgus CD33 served as target cells. Effector- to target cell ratio (E:T-ratio) was 10:1. The concentration of CD33-AF5 VH-VL×I2C VH-VL required for half-maximal target cell lysis (EC50) was calculated from the dose response curve with a value of 2.7 ng/ml.

[0531] FIG. 26

[0532] (A) Dose- and time-dependent depletion of CD33-positive monocytes from the peripheral blood of cynomolgus monkeys through intravenous continuous infusion of CD33-AF5 VH-VL×I2C VH-VL as described in Example 14. The percentage relative to baseline (i.e. 100%) of absolute circulating CD33-positive monocyte counts after the duration of treatment as indicated above the columns is shown for each of two cynomolgus monkeys per dose level. The dose level (i.e. infusion flow-rate) is indicated below the columns. No depletion of circulating CD33-positive monocytes was observed in animals 1 and 2 treated for 7 days at a dose of 30 μg/m²/24 h. In animals 3 and 4 treated for 7 days at a dose of 60 μg/m²/24 h circulating CD33-positive monocyte counts were reduced to 68% and 40% of baseline, respectively. At 240 μg/m²/24 h circulating CD33-positive monocytes were almost completely depleted from the peripheral blood after 3 days of treatment (animals 5 and 6). At 1000 μg/m²/24 h depletion of circulating CD33-positive monocytes from the peripheral blood was completed already after 1 day of treatment (animals 7 and 8). (B) Course of T cell and CD33-monocyte counts in peripheral blood of two cynomolgus monkeys during continuous infusion of CD33-AF5 VH-VL×I2C VH-VL for 14 days at 120 μg/m²/24 h. Absolute cell counts are given in 1000 cells per microliter blood. The first data point shows baseline counts immediately prior to the start of infusion. After initial mobilisation of CD33-monocytes during the first 12 hours upon start of infusion CD33-monocytes in peripheral blood (filled triangles) are depleted by two thirds (animal 10) and 50% (animal 9) relative to the respective baseline counts during the further course of infusion. Circulating T cell counts (open squares) show a limited initial drop followed by recovery still during the presence of circulating CD33-positive monocytic target cells.

[0533] FIG. 27

[0534] Cytotoxic activity of MCSP-G4 VH-VL×I2C VH-VL test material used for the in vivo study in cynomolgus monkeys as described in Example 15. Specific lysis of MCSP-positive target cells was determined in a standard ⁵¹Chromium release assay at increasing concentrations of MCSP-G4 VH-VL×I2C VH-VL. Assay duration was 18 hours. The macaque T cell line 4119 LnPx was used as source of effector cells. CHO cells transfected with cynomolgus MCSP served as target cells. Effector- to target cell ratio (E:T-ratio) was 10:1. The concentration of MCSP-G4 VH-VL×I2C VH-VL required for half-maximal target cell lysis (EC50) was calculated from the dose response curve with a value of 1.9 ng/ml.

[0535] FIG. 28

[0536] Absence of initial episodes of drop and subsequent recovery of absolute T cell counts (i.e. redistribution) in peripheral blood of cynomolgus monkeys during the starting phase of intravenous infusion with the CD3 binding molecule MCSP-G4 VH-VL×I2C VH-VL recognizing an essentially context independent CD3 epitope. Absolute cell counts are given in 1000 cells per microliter blood. The first data point shows baseline counts immediately prior to the start of infusion. The MCSP-G4 VH-VL×I2C VH-VL dose is given in parentheses beside the animal number. In the known absence of MCSP-positive target cells from the circulating blood of cynomolgus monkeys there is no induction of T cell redistribution (i.e. an initial episode of drop and subsequent recovery of absolute T cell counts) through target cell mediated crosslinking of CD3. Moreover, induction of T cell redistribution (i.e. an initial episode of drop and subsequent recovery of absolute T cell counts) through a signal, which the T cells may receive through exclusive interaction with a CD3 binding site only, can be avoided by the use of CD3 binding molecules like MCSP-G4 VH-VL×I2C VH-VL recognizing an essentially context independent CD3 epitope.

[0537] FIG. 29

[0538] FACS binding analysis of designated cross-species specific bispecific constructs to CHO cells transfected with human CD33, the human CD3+ T cell line HPB-ALL, CHO cells transfected with macaque CD33 and macaque PBMC respectively. The FACS staining is performed as described in Example 16.4. The bold lines represent cells incubated with 5 μg/ml purified bispecific single chain construct or cell culture supernatant of transfected cells expressing the cross-species specific bispecific antibody constructs. The filled histograms reflect the negative controls. Supernatant of untransfected CHO cells was used as negative control. For each cross-species specific bispecific single chain construct the overlay of the histograms shows specific binding of the construct to human and macaque CD33 and human and macaque CD3.

[0539] FIG. 30

[0540] The diagrams show results of chromium release assays measuring cytotoxic activity induced by designated cross-species specific CD33 specific single chain constructs redirected to the indicated target cell lines. Effector cells were also used as indicated. The assays are performed as described in Example 16.5. The diagrams clearly demonstrate for each construct the potent recruitment of cytotoxic activity of human and macaque effector cells against human and macaque CD33 transfected CHO cells, respectively.

[0541] FIG. 31

[0542] SDS PAGE gel and Western blot monitoring the purification of the cross-species specific bispecific single chain molecule designated E292F3 HL×I2C HL. Samples from the eluate, the cell culture supernatant (SN) and the flow through of the column (FT) were analyzed as indicated. A protein marker (M) was applied as size reference. A strong protein band with a molecular weight between 50 and 60 kDa in the SDS PAGE gel demonstrates the efficient purification of the cross-species specific bispecific single chain molecule to a very high degree of purity with the one-step purification method described in Example 17.2. The Western blot detecting the histidine₆ tag confirms the identity of the protein band in the eluate as the cross-species specific bispecific single chain molecule. The faint signal for the flow through sample in this sensitive detection method further shows the nearly complete capture of bispecific single chain molecules by the purification method.

[0543] FIG. 32

[0544] SDS PAGE gel and Western blot monitoring the purification of the cross-species specific bispecific single chain molecule designated V207C12 HL×H2C HL. Samples from the eluate, the cell culture supernatant (SN) and the flow through of the column (FT) were analyzed as indicated. A protein marker (M) was applied as size reference. A strong protein band with a molecular weight between 50 and 60 kDa in the SDS PAGE gel demonstrates the efficient purification of the cross-species specific bispecific single chain molecule to a very high degree of purity with the one-step purification method described in Example 17.2. The Western blot detecting the histidine₆ tag confirms the identity of the protein band in the eluate as the cross-species specific bispecific single chain molecule. The faint signal for the flow through sample in this sensitive detection method further shows the nearly complete capture of bispecific single chain molecules by the purification method.

[0545] FIG. 33

[0546] SDS PAGE gel and Western blot monitoring the purification of the cross-species specific bispecific single chain molecule designated AF5HL×F12QHL. Samples from the eluate, the cell culture supernatant (SN) and the flow through of the column (FT) were analyzed as indicated. A protein marker (M) was applied as size reference. A strong protein band with a molecular weight between 50 and 60 kDa in the SDS PAGE gel demonstrates the efficient purification of the cross-species specific bispecific single chain molecule to a very high degree of purity with the one-step purification method described in Example 17.2. The Western blot detecting the histidine₆ tag confirms the identity of the protein band in the eluate as the cross-species specific bispecific single chain molecule. The signal in the flow through sample in this sensitive detection method is explained by saturation of the affinity column due to the high concentration of bispecific single chain molecules in the supernatant.

[0547] FIG. 34

[0548] Standard curve of AF5HL×I2CHL in 50% macaque monkey serum. The upper diagram shows the standard curve generated for the assay as described in Example 18.2.

[0549] The lower diagram shows results for quality control samples of AF5HL×I2CHL in 50% macaque monkey serum. The recovery rates are above 90% for the high and mid QC sample and above 80% for the low QC sample.

[0550] Thus the assay allows for detection of AF5HL×I2CHL in serum samples in the range from 10 ng/ml to 200 ng/ml (before dilution).

[0551] FIG. 35

[0552] Standard curve of MCSP-G4 HL×I2C HL in 50% macaque monkey serum. The upper diagram shows the standard curve generated for the assay as described in Example 18.2.

[0553] The lower diagram shows results for quality control samples of MCSP-G4 HL×I2C HL in 50% macaque monkey serum. The recovery rates are above 98% for the high and mid QC sample and above 85% for the low QC sample.

[0554] Thus the assay allows for detection of MCSP-G4 HL×I2C HL in serum samples in the range from 10 ng/ml to 200 ng/ml (before dilution).

[0555] FIG. 36

[0556] FACS binding analysis of an anti-Flag antibody to CHO cells transfected with the 1-27 N-terminal amino acids of CD3 epsilon of the designated species fused to cynomolgus EpCAM. The FACS staining was performed as described in Example 19.1. The bold lines represent cells incubated with the anti-Flag antibody. The filled histograms reflect the negative controls. PBS with 2% FCS was used as negative control. The histograms show strong and comparable binding of the anti-Flag antibody to all transfectants indicating strong and equal expression of the transfected constructs.

[0557] FIG. 37

[0558] FACS binding analysis of the I2C IgG1 construct to CHO cells expressing the 1-27 N-terminal amino acids of CD3 epsilon of the designated species fused to cynomolgus EpCAM. The FACS staining is performed as described in Example 19.3. The bold lines represent cells incubated with 50 μl cell culture supernatant of cells expressing the I2C IgG1 construct. The filled histograms reflect the negative control. Cells expressing the 1-27 N-terminal amino acids of CD3 epsilon of swine fused to cynomolgus EpCAM were used as negative control. In comparison with the negative control the histograms clearly demonstrate binding of the I2C IgG1 construct to 1-27 N-terminal amino acids of CD3 epsilon of human, marmoset, tamarin and squirrel monkey.

[0559] FIG. 38

[0560] FACS binding analysis of the I2C IgG1 construct as described in Example 19.2 to human CD3 with and without N-terminal His6 tag as described in Examples 6.1 and 5.1 respectively. The bold lines represent cells incubated with the anti-human CD3 antibody UCHT-1, the penta-His antibody (Qiagen) and cell culture supernatant of cells expressing the I2C IgG1 construct respectively as indicated. The filled histograms reflect cells incubated with an irrelevant murine IgG1 antibody as negative control.

[0561] The upper two histogram overlays show comparable binding of the UCHT-1 antibody to both transfectants as compared to the isotype control demonstrating expression of both recombinant constructs. The centre histogram overlays show binding of the penta his antibody to the cells expressing the His6-human CD3 epsilon chain (His6-CD3) but not to the cells expressing the wild-type CD3 epsilon chain (WT-CD3). The lower Histogram overlays show binding of the I2C IgG1 construct to the wild-type human CD3 epsilon chain but not to the His6-human CD3 epsilon chain. These results demonstrate that a free N-terminus is essential for binding of the cross-species specific anti-CD3 binding molecule 120 to the CD3 epsilon chain.

[0562] FIG. 39

[0563] FACS binding analysis of designated cross-species specific bispecific single chain constructs to CHO cells transfected with human MCSP D3, the human CD3+ T cell line HPB-ALL, CHO cells transfected with macaque MCSP D3 and the macaque T cell line 4119 LnPx respectively. The FACS staining was performed as described in Example 10. The bold lines represents cells incubated with 2 μg/ml purified bispecific single chain construct or cell supernatant containing the bispecific single chain construct respectively. The filled histograms reflect the negative controls. Supernatant of untransfected CHO cells was used as negative control for binding to the T cell lines. A single chain construct with irrelevant target specificity was used as negative control for binding to the MCSP D3 transfected CHO cells. For each cross-species specific bispecific single chain construct the overlay of the histograms shows specific binding of the construct to human and macaque MCSP D3 and human and macaque CD3.

[0564] FIG. 40

[0565] Cytotoxic activity induced by designated cross-species specific MCSP D3 specific single chain constructs redirected to the indicated target cell lines. Effector cells and effector to target ratio were also used as indicated. The assay is performed as described in Example 11. The diagrams clearly demonstrate potent cross-species specific recruitment of cytotoxic activity by each construct.

[0566] FIG. 41

[0567] FACS binding analysis of designated cross-species specific bispecific single chain constructs to CHO cells transfected with human CD33, the human CD3+ T cell line HPB-ALL, CHO cells transfected with macaque CD33 and macaque PBMC respectively. The FACS staining was performed as described in Example 21.2. The bold lines represent cells incubated with cell culture supernatant of transfected cells expressing the cross-species specific bispecific antibody constructs. The filled histograms reflect the negative controls. Supernatant of untransfected CHO cells was used as negative control. For each cross-species specific bispecific single chain construct the overlay of the histograms shows specific binding of the construct to human and macaque CD33 and human and macaque CD3.

[0568] FIG. 42

[0569] The diagrams show results of chromium release assays measuring cytotoxic activity induced by designated cross-species specific CD33 specific single chain constructs redirected to the indicated target cell lines. Effector cells were also used as indicated. The assays are performed as described in Example 21.3. The diagrams clearly demonstrate for each construct the potent recruitment of cytotoxic activity of human and macaque effector cells against human and macaque CD33 transfected CHO cells, respectively.

[0570] FIG. 43

[0571] T cell redistribution in a chimpanzee under weekly intravenous bolus infusion with PBS/5% HSA and PBS/5% HSA plus single-chain EpCAM/CD3-bispecific antibody construct at doses of 1.6, 2.0, 3.0 and 4.5 μg/kg. The infusion time for each bolus administration was 2 hours. Vertical arrows indicate the start of bolus infusions. Data points at the beginning of each bolus administration show the T cell counts immediately prior to start of bolus infusion. Each bolus infusion of the single-chain EpCAM/CD3-bispecific antibody construct, which recognizes a conventional context dependent CD3 epitope, triggered an episode of T cell redistribution followed by recovery of T cells to baseline values prior to the next bolus infusion.

[0572] FIG. 44

[0573] CD3 specific ELISA analysis of periplasmic preparations containing Flag tagged scFv protein fragments from selected clones. Periplasmic preparations of soluble scFv protein fragments were added to wells of an ELISA plate, which had been coated with soluble human CD3 epsilon (aa 1-27)-Fc fusion protein and had been additionally blocked with PBS 3% BSA. Detection was performed by a monoclonal anti Flag-Biotin-labeled antibody followed by peroxidase-conjugated Streptavidin. The ELISA was developed by an ABTS substrate solution. The OD values (y axis) were measured at 405 nm by an ELISA reader. Clone names are presented on the x axis.

[0574] FIG. 45

[0575] ELISA analysis of periplasmic preparations containing Flag tagged scFv protein fragments from selected clones. The same periplasmic preparations of soluble scFv protein fragments as in FIG. 44 were added to wells of an ELISA plate which had not been coated with human CD3 epsilon (aa 1-27)-Fc fusion protein but with huIgG1 (Sigma) and blocked with 3% BSA in PBS.

[0576] Detection was performed by a monoclonal anti Flag-Biotin-labeled antibody followed by peroxidase-conjugated Streptavidin. The ELISA was developed by an ABTS substrate solution. The OD values (y axis) were measured at 405 nm by an ELISA reader. Clone names are presented on the x axis.

[0577] FIG. 46

[0578] FIGS. 46A-G: FACS binding analysis of designated cross-species specific bispecific single chain constructs to CHO cells transfected with human PSCA, the human CD3+ T cell line HPB-ALL, CHO cells transfected with macaque PSCA and to the macaque T cell line 4119LnPx, respectively. The FACS staining was performed as described in Example 24.5. The bold lines represent cells incubated with cell culture supernatant of transfected cells expressing the cross-species specific bispecific antibody constructs. The filled histograms reflect the negative controls. Supernatant of untransfected cells was used as a negative control. For each cross-species specific bispecific single chain construct the overlay of the histograms shows specific binding of the construct to human and macaque PSCA and human and macaque CD3.

[0579] FIG. 47

[0580] FIG. 47A-C: The diagrams show results of chromium release assays measuring cytotoxic activity induced by the designated cross-species specific bispecific single chain constructs redirected to the indicated target cell lines. Effector cells were also used as indicated. The assays were performed as described in Example 24.6. The diagrams clearly demonstrate for each construct the potent recruitment of cytotoxic activity of human and macaque effector cells against cells positive for human and macaque PSCA, respectively.

[0581] FIG. 48

[0582] FACS binding analysis of designated cross-species specific bispecific single chain constructs to CHO cells transfected with human PSCA, the human CD3+ T cell line HPB-ALL, CHO cells transfected with macaque PSCA and to the macaque T cell line 4119LnPx, respectively. The FACS staining was performed as described in Example 45.5. The bold lines represent cells incubated with cell culture supernatant of transfected cells expressing the cross-species specific bispecific antibody constructs. The filled histograms show the negative controls. Supernatant of untransfected cells was used as negative control. For each cross-species specific bispecific single chain construct the overlay of the histograms shows specific binding of the construct to human and macaque PSCA and human and macaque CD3.

[0583] FIG. 49

[0584] The diagrams show results of chromium release assays measuring cytotoxic activity induced by designated cross-species specific bispecific single chain constructs redirected to the indicated target cell lines. Effector cells were also used as indicated. The assays were performed as described in Example 24.6. The diagrams clearly demonstrate for each construct the potent recruitment of cytotoxic activity of human and macaque effector T cells against target cells positive for human and macaque PSCA, respectively.

[0585] FIG. 50

[0586] FACS binding analysis of designated cross-species specific bispecific single chain constructs to CHO cells transfected with human CD19, the human CD3-positive T cell line HPB-ALL, and the CD3-positive macaque T cell line 4119 LnPx. The FACS staining is performed as described in Example 25.4. The thick-line histograms represent cells incubated with cell culture supernatant and subsequently with a murine anti-His-tag antibody followed by a PE-labeled anti-murine Ig detection antibody. The thin-lined histograms represent the negative control i.e. cells only incubated with the anti-His-tag antibody and the anti-murine Ig detection antibody.

[0587] FIG. 51

[0588] Cytotoxic T cell activity redirected by designated cross-species specific bispecific single chain constructs against the indicated target cell line. A) Stimulated CD4/CD56-depleted human PBMCs are used as effector T cells and CHO cells transfected with human CD19 as target cells. B) The macaque T cell line 4119 LnPx is used as source of effector cells and CHO cells transfected with human CD19 are used as target cells. The assay is performed as described in Example 25.5.

[0589] FIG. 52

[0590] FACS binding analysis of the designated cross-species specific bispecific single chain constructs to the C-MET positive human breast cancer cell line MDA-MB-231, the human CD3+ T cell line HPB-ALL and to the macaque CD3+ T cell line 4119LnPx respectively. The FACS staining was performed as described in Example 26.5. The bold lines represent cells incubated with cell culture supernatant of transfected cells expressing the cross-species specific bispecific antibody constructs. The filled histograms represent the negative controls. Supernatant of untransfected cells was used as a negative control. For each cross-species specific bispecific single chain construct the overlay of the histograms shows specific binding of the construct to C-MET and human and macaque CD3.

[0591] FIG. 53

[0592] The diagrams show results of chromium release assays measuring cytotoxic activity induced by the designated cross-species specific bispecific single chain constructs redirected to the indicated target cell lines. Effector cells were also used as indicated. The assays were performed as described in Example 26.6. The diagrams clearly demonstrate for each construct the potent recruitment of cytotoxic activity of human effector cells against cells positive for C-MET.

[0593] FIG. 54

[0594] FACS binding analysis of designated cross-species specific bispecific single chain constructs to CHO cells expressing human cMET as described in Example 27.1, the human CD3+ T cell line HPB-ALL, CHO cells expressing macaque cMET as described in Example 27.1 and the macaque T cell line 4119LnPx, respectively. The FACS staining was performed as described in Example 27.2. The bold lines represent cells incubated with cell culture supernatant of transfected cells expressing the cross-species specific bispecific antibody constructs. The filled histograms show the negative controls. Supernatant of untransfected CHO cells was used as negative control. For each cross-species specific bispecific single chain construct the overlay of the histograms shows specific binding of the construct to human and macaque cMET and human and macaque CD3.

[0595] FIG. 55

[0596] The diagrams show results of chromium release assays measuring cytotoxic activity induced by designated cross-species specific cMET specific single chain constructs redirected to the indicated target cell line generated as described in Example 27.1. Effector cells were also used as indicated. The assays were performed as described in Example 27.4. The diagrams clearly demonstrate for each construct the potent recruitment of cytotoxic activity of macaque effector T cells against target cells positive for macaque cMET.

[0597] FIG. 56

[0598] FACS binding analysis of designated cross-species specific scFv antibodies to CHO cells expressing human cMET as described in Example 27.1 and CHO cells expressing macaque cMET as described in Example 27.1, respectively. The FACS staining was performed as described in Example 27.3. The bold lines represent cells incubated with periplasmic preparations containing the cross-species specific scFv antibodies. The filled histograms show the negative controls. The Buffer used for periplasmic preparations was used as negative control. For each cross-species specific scFv antibody the overlay of the histograms shows specific binding of the construct to human and macaque cMET.

[0599] FIG. 57

[0600] FACS binding analysis of a cross-species specific scFv-antibody fragment to CHO cells transfected with human Endosialin and to CHO cells transfected with macaque Endosialin. The FACS staining was performed as described in Example 28.3. The bold lines represent cells incubated with a periplasmic preparation containing the scFv-antibody fragment. The thin lines represent the negative controls. Untransfected CHO cells were used as a negative control. The overlays of the histograms show specific binding of the scFv-antibody fragment to human and macaque Endosialin.

[0601] FIG. 58

[0602] FACS binding analysis of designated cross-species specific bispecific single chain constructs to CHO cells transfected with human CD248, the human CD3+ T cell line HPB-ALL, CHO cells transfected with macaque CD248 and the macaque T cell line 4119LnPx, respectively. The FACS staining was performed as described in Example 29.1. The bold lines represent cells incubated with cell culture supernatant of transfected cells expressing the cross-species specific bispecific antibody constructs. The thin lines show the negative controls. Supernatant of untransfected CHO cells was used as negative control. For each cross-species specific bispecific single chain construct the overlay of the histograms shows specific binding of the construct to human and macaque CD248 and human and macaque CD3.

[0603] FIG. 59

[0604] The diagrams show results of chromium release assays measuring cytotoxic activity induced by designated cross-species specific CD248 specific single chain constructs redirected to the indicated target cell lines. Effector cells were also used as indicated. The assays were performed as described in Example 29.1. The diagrams clearly demonstrate for each construct the potent recruitment of cytotoxic activity of human and macaque effector T cells against target cells positive for human and macaque CD248, respectively.

[0605] FIG. 60

[0606] FACS binding analysis of designated cross-species specific bispecific single chain constructs to CHO cells transfected with human EpCAM, human CD3+ T cell line HPB-ALL, and the macaque T cell line 4119 LnPx. The FACS staining was performed as described in Example 30.4. The thick line represents cells incubated with cell culture supernatant that were subsequently incubated with the anti-his antibody and the PE labeled detection antibody. The thin histogram line shows the negative control: cells only incubated with the anti-his antibody and the detection antibody.

[0607] FIG. 61

[0608] Cytotoxic activity induced by designated cross-species specific bispecific single chain constructs redirected to the indicated target cell lines. A) Stimulated CD4-/CD56-human PBMCs are used as effector cells, CHO cells transfected with human EpCAM as target cells. B) The macaque T cell line 4119 LnPx were used as effector cells, CHO cells transfected with human EpCAM as target cells. The assay was performed as described in Example 30.5.

[0609] FIG. 62

[0610] Cytotoxic activity induced by designated cross-species specific bispecific single chain constructs redirected to the indicated target cell lines. A) Stimulated CD4-/CD56-human PBMCs are used as effector cells, CHO cells transfected with human EpCAM as target cells. B) The macaque T cell line 4119 LnPx were used as effector cells, CHO cells transfected with human EpCAM as target cells. The assay was performed as described in Example 30.5.

[0611] FIG. 63

[0612] Cytotoxic activity induced by designated cross-species specific bispecific single chain constructs redirected to the indicated target cell lines. A) and B) Stimulated CD4-/CD56-human PBMCs are used as effector cells, CHO cells transfected with human EpCAM as target cells. The assay was performed as described in Example 30.5.

[0613] FIGS. 64 and 65

[0614] Cytotoxic activity induced by designated cross-species specific bispecific single chain constructs redirected to the indicated target cell lines. A) and B) The macaque T cell line 4119 LnPx were used as effector cells, CHO cells transfected with human EpCAM as target cells. The assay was performed as described in Example 30.5

[0615] FIG. 66

[0616] Cytotoxic activity induced by designated cross-species specific bispecific single chain constructs redirected to the indicated target cell lines. A) Stimulated CD4-/CD56-human PBMCs are used as effector cells, CHO cells transfected with human EpCAM as target cells. B) The macaque T cell line 4119 LnPx were used as effector cells, CHO cells transfected with human EpCAM as target cells. The assay was performed as described in Example 30.5

[0617] FIG. 67

[0618] FACS binding analysis of designated cross-species specific bispecific single chain constructs to CHO cells transfected with human, mouse or human-mouse hybrid EpCAM. The FACS staining was performed as described in Example 30.7. The bars represent the median fluorescence intensity of the designated constructs to the stated EpCAM antigens.

[0619] FIG. 68

[0620] In the FACS analysis, the indicated constructs showed binding to CD3 and FAPalpha compared to the negative control. Cross-species specificity of the bispecific antibodies to human and macaque CD3 and FAP alpha antigens, respectively, was demonstrated. The assay was performed as described in Example 31

[0621] FIG. 69

[0622] All of the generated cross-species specific bispecific single chain antibody constructs demonstrated cytotoxic activity against human FAPalpha positive target cells elicited by stimulated human CD4/CD56 depleted PBMC and macaque FAPalpha positive target cells elicited by the macaque T cell line 4119LnPx. The assay was performed as described in Example 31

[0623] FIG. 70

[0624] FACS binding analysis of designated cross-species specific bispecific single chain constructs to CHO cells transfected with human FAPalpha, the human CD3+ T cell line HPB-ALL, CHO cells transfected with macaque FAPalpha and the macaque T cell line 4119LnPx, respectively. The FACS staining was performed as described in Example 32.1. The bold lines represent cells incubated with cell culture supernatant of transfected cells expressing the cross-species specific bispecific antibody constructs. The thin lines show the negative controls. Supernatant of untransfected CHO cells was used as negative control. For each cross-species specific bispecific single chain construct the overlay of the histograms shows specific binding of the construct to human and macaque FAPalpha and human and macaque CD3.

[0625] FIG. 71

[0626] The diagrams show results of chromium release assays measuring cytotoxic activity induced by designated cross-species specific FAPalpha specific single chain constructs redirected to the indicated target cell lines. Effector cells were also used as indicated. The assays were performed as described in Example 32.1. The diagrams clearly demonstrate for each construct the potent recruitment of cytotoxic activity of human and macaque effector T cells against target cells positive for human and macaque FAPalpha, respectively.

[0627] FIG. 72

[0628] FACS binding analysis of designated cross-species specific scFv antibodies to CHO cells transfected with human FAPalpha and CHO cells transfected with macaque FAPalpha, respectively. The FACS staining was performed as described in Example 32.2. The bold lines represent cells incubated with periplasmic preparations containing the cross-species specific scFv antibodies. The filled histograms show the negative controls. The Buffer used for periplasmic preparations was used as negative control. For each cross-species specific scFv antibody the overlay of the histograms shows specific binding of the construct to human and macaque FAPalpha.

[0629] FIG. 73

[0630] FACS binding analysis of designated cross-species specific bispecific single chain constructs to CHO cells transfected with human IGF-1R, the human CD3+ T cell line HPB-ALL, CHO cells transfected with macaque IGF-1R and to the macaque T cell line 4119LnPx, respectively. The FACS staining was performed as described in Example 33.3. The bold lines represent cells incubated with cell culture supernatant of transfected cells expressing the cross-species specific bispecific antibody constructs. The filled histograms show the negative controls. Cell culture medium was used as negative control. For each cross-species specific bispecific single chain construct the overlay of the histograms shows specific binding of the construct to human and macaque IGF-1R and human and macaque CD3.

[0631] FIG. 74

[0632] The diagrams show results of chromium release assays measuring cytotoxic activity induced by designated cross-species specific bispecific single chain constructs redirected to the indicated target cell lines. Effector cells were also used as indicated. The assays were performed as described in Example 33.3. The diagrams clearly demonstrate for each construct the recruitment of cytotoxic activity of human and macaque effector T cells against target cells positive for human and macaque IGF-1R, respectively.

[0633] The present invention is additionally described by way of the following illustrative non-limiting examples that provide a better understanding of the present invention and of its many advantages.

### EXAMPLES

### 1. Identification of CD3Epsilon Sequences from Blood Samples of Non-Human Primates

[0634] Blood samples of the following non-human primates were used for CD3epsilon-identification: Callithrix jacchus, Saguinus oedipus and Saimiris ciureus. Fresh heparin-treated whole blood samples were prepared for isolating total cellular RNA according to manufacturer's protocol (QIAamp RNA Blood Mini Kit, Qiagen). The extracted mRNA was transcribed into cDNA according to published protocols. In brief, 10 μl of precipitated RNA was incubated with 1.2 μl of 10× hexanucleotide mix (Roche) at 70° C. for 10 minutes and stored on ice. A reaction mix consisting of 4 μl of 5× superscript II buffer, 0.2 μl of 0.1M dithiothreitole, 0.8 μl of superscript II (Invitrogen), 1.2 μl of desoxyribonucleoside triphosphates (25 μM), 0.8 μl of RNase Inhibitor (Roche) and 1.8 μl of DNase and RNase free water (Roth) was added. The reaction mix was incubated at room temperature for 10 minutes followed by incubation at 42° C. for 50 minutes and at 90° C. for 5 minutes. The reaction was cooled on ice before adding 0.8 μl of RNaseH (1 U/μl, Roche) and incubated for 20 minutes at 37° C.

[0635] The first-strand cDNAs from each species were subjected to separate 35-cycle polymerase chain reactions using Taq DNA polymerase (Sigma) and the following primer combination designed on database research: forward primer 5’-AGAGTTCTGGGCCTCTGC-3′ (SEQ ID NO: 253); reverse primer 5′-CGGATGGGCTCATAGTCTG-3′ (SEQ ID NO: 254). The amplified 550 bp-bands were gel purified (Gel Extraction Kit, Qiagen) and sequenced (Sequiserve, Vaterstetten/Germany, see sequence listing).

| CD3epsilon Callithrix jacchus | |
|---|---|
| Nucleotides | |
| CAGGACGGTAATGAAGAAATGGGTGATACTACACAGAACCCATATAAAGTTTCCATCTCAGG | |
| AACCACAGTAACACTGACATGCCCTCGGTATGATGGACATGAAATAAAATGGCTCGTAAATA | |
| GTCAAAACAAAGAAGGTCATGAGGACCACCTGTTACTGGAGGACTTTTCGGAAATGGAGCAA | |
| AGTGGTTATTATGCCTGCCTCTCCAAAGAGACTCCCGCAGAAGAGGCGAGCCATTATCTCTA | |
| CCTGAAGGCAAGAGTGTGTGAGAACTGCGTGGAGGTGGAT | |
| Amino acids | (SEQ ID NO: 3) |
| QDGNEEMGDTTQNPYKVSISGTTVTLTCPRYDGHEIKWLVNSQNKEGHEDHLLLEDFSEMEQ | |
| SGYYACLSKETPAEEASHYLYLKARVCENCVEVD | |
| CD3epsilon Saguinus oedipus | |
| Nucleotides | |
| CAGGACGGTAATGAAGAAATGGGTGATACTACACAGAACCCATATAAAGTTTCCATCTCAGG | |
| AACCACAGTAACACTGACATGCCCTCGGTATGATGGACATGAAATAAAATGGCTTGTAAATA | |
| GTCAAAACAAAGAAGGTCATGAGGACCACCTGTTACTGGAGGATTTTTCGGAAATGGAGCAA | |
| AGTGGTTATTATGCCTGCCTCTCCAAAGAGACTCCCGCAGAAGAGGCGAGCCATTATCTCTA | |
| CCTGAAGGCAAGAGTGTGTGAGAACTGCGTGGAGGTGGAT | |
| Amino acids | (SEQ ID NO: 5) |
| QDGNEEMGDTTQNPYKVSISGTTVTLTCPRYDGHEIKWLVNSQNKEGHEDHLLLEDFSEMEQ | |
| SGYYACLSKETPAEEASHYLYLKARVCENCVEVD | |
| CD3epsilon Saimiris ciureus | |
| Nucleotides | |
| CAGGACGGTAATGAAGAGATTGGTGATACTACCCAGAACCCATATAAAGTTTCCATCTCAGG | |
| AACCACAGTAACACTGACATGCCCTCGGTATGATGGACAGGAAATAAAATGGCTCGTAAATG | |
| ATCAAAACAAAGAAGGTCATGAGGACCACCTGTTACTGGAAGATTTTTCAGAAATGGAACAA | |
| AGTGGTTATTATGCCTGCCTCTCCAAAGAGACCCCCACAGAAGAGGCGAGCCATTATCTCTA | |
| CCTGAAGGCAAGAGTGTGTGAGAACTGCGTGGAGGTGGAT | |
| Amino acids | (SEQ ID NO: 7) |

QDGNEEIGDTTQNPYKVSISGTTVTLTCPRYDGQEIKWLVNDQNKEGHEDHLLLEDFSEMEQ
SGYYACLSKETPTEEASHYLYLKARVCENCVEVD

### 2. Generation of Cross-Species Specific Single Chain Antibody Fragments (scFv) Binding to the N-Terminal Amino Acids 1-27 of CD3Epsilon of Man and Different Non-Chimpanzee Primates

[0636] 2.1. Immunization of Mice Using the N-Terminus of CD3Epsilon Separated from its Native CD3-Context by Fusion to a Heterologous Soluble Protein

[0637] Ten weeks old F1 mice from balb/c×C57black crossings were immunized with the CD3epsilon-Fc fusion protein carrying the most N-terminal amino acids 1-27 of the mature CD3epsilon chain (1-27 CD3-Fc) of man and/or saimiris ciureus. To this end 40 μg of the 1-27 CD3-Fc fusion protein with 10 nmol of a thioate-modified CpG-Oligonucleotide (5′-tccatgacgttcctgatgct-3′) (SEQ ID No. 343) in 300 ul PBS were injected per mouse intra-peritoneally. Mice receive booster immunizations after 21, 42 and optionally 63 days in the same way. Ten days after the first booster immunization, blood samples were taken and antibody serum titer against 1-27 CD3-Fc fusion protein iwa tested by ELISA. Additionally, the titer against the CD3-positive human T cell line HPBall was tested in flow cytometry according to standard protocols. Serum titers were significantly higher in immunized than in non-immunized animals.

2.2. Generation of an Immune Murine Antibody scFv Library: Construction of a Combinatorial Antibody Library and Phage Display

[0638] Three days after the last injection the murine spleen cells were harvested for the preparation of total RNA according to standard protocols.

[0639] A library of murine immunoglobuline (Ig) light chain (kappa) variable region (VK) and Ig heavy chain variable region (VH) DNA-fragments was constructed by RT-PCR on murine spleen RNA using VK- and VH specific primer. cDNA was synthesized according to standard protocols.

[0640] The primers were designed in a way to give rise to a 5′-XhoI and a 3′-BstEII recognition site for the amplified heavy chain V-fragments and to a 5′-SacI and a 3′-SpeI recognition site for amplified VK DNA fragments.

[0641] For the PCR-amplification of the VH DNA-fragments eight different 5′-VH-family specific primers (MVH1(GC)AG GTG CAG CTC GAG GAG TCA GGA CCT (SEQ ID No. 344); MVH2 GAG GTC CAG CTC GAG CAG TCT GGA CCT (SEQ ID No. 345); MVH3 CAG GTC CAA CTC GAG CAG CCT GGG GCT (SEQ ID No. 346); MVH4 GAG GTT CAG CTC GAG CAG TCT GGG GCA (SEQ ID No. 347); MVH5 GA(AG) GTG AAG CTC GAG GAG TCT GGA GGA (SEQ ID No. 348); MVH6 GAG GTG AAG CTT CTC GAG TCT GGA GGT (SEQ ID No. 349); MVH7 GAA GTG AAG CTC GAG GAG TCT GGG GGA (SEQ ID No. 350); MVH8 GAG GTT CAG CTC GAG CAG TCT GGA GCT (SEQ ID No. 351)) were each combined with one 3′-VH primer (3′MuVHBstEII tga gga gac ggt gac cgt ggt ccc ttg gcc cca g (SEQ ID No. 352)); for the PCR amplification of the VK-chain fragments seven different 5′-VK-family specific primers (MUVK1 CCA GTT CCG AGC TCG TTG TGA CTC AGG AAT CT (SEQ ID No. 353); MUVK2 CCA GTT CCG AGC TCG TGT TGA CGC AGC CGC CC (SEQ ID No. 354); MUVK3 CCA GTT CCG AGC TCG TGC TCA CCC AGT CTC CA (SEQ ID No. 355); MUVK4 CCA GTT CCG AGC TCC AGA TGA CCC AGT CTC CA (SEQ ID No. 356); MUVK5 CCA GAT GTG AGC TCG TGA TGA CCC AGA CTC CA (SEQ ID No. 357); MUVK6 CCA GAT GTG AGC TCG TCA TGA CCC AGT CTC CA (SEQ ID No. 358); MUVK7 CCA GTT CCG AGC TCG TGA TGA CAC AGT CTC CA (SEQ ID No. 359)) were each combined with one 3′-VK primer (3′MuVkHindIII/BsiW1 tgg tgc act agt cgt acg ttt gat ctc aag ctt ggt ccc (SEQ ID No. 360)).

[0642] The following PCR program was used for amplification: denaturation at 94° C. for 20 sec; primer annealing at 52° C. for 50 sec and primer extension at 72° C. for 60 sec and 40 cycles, followed by a 10 min final extension at 72° C.

[0643] 450 ng of the kappa light chain fragments (SacI-SpeI digested) were ligated with 1400 ng of the phagemid pComb3H5Bhis (SacI-SpeI digested; large fragment). The resulting combinatorial antibody library was then transformed into 300 ul of electrocompetent Escherichia coli XL1 Blue cells by electroporation (2.5 kV, 0.2 cm gap cuvette, 25 uFD, 200 Ohm, Biorad gene-pulser) resulting in a library size of more than 10⁷ independent clones. After one hour of phenotype expression, positive transformants were selected for carbenicilline resistance encoded by the pComb3H5BHis vector in 100 ml of liquid super broth (SB)-culture over night. Cells were then harvested by centrifugation and plasmid preparation was carried out using a commercially available plasmid preparation kit (Qiagen).

[0644] 2800 ng of this plasmid-DNA containing the VK-library (XhoI-BstEII digested; large fragment) were ligated with 900 ng of the heavy chain V-fragments (XhoI-BstEII digested) and again transformed into two 300 ul aliquots of electrocompetent E. coli XL1 Blue cells by electroporation (2.5 kV, 0.2 cm gap cuvette, 25 uFD, 200 Ohm) resulting in a total VH-VK scFv (single chain variable fragment) library size of more than 10⁷ independent clones.

[0645] After phenotype expression and slow adaptation to carbenicillin, the E. coli cells containing the antibody library were transferred into SB-Carbenicillin (50 ug/mL) selection medium. The E. coli cells containing the antibody library was s then infected with an infectious dose of 10¹² particles of helper phage VCSM13 resulting in the production and secretion of filamentous M13 phage, wherein phage particle contains single stranded pComb3H5BHis-DNA encoding a murine scFv-fragment and displayed the corresponding scFv-protein as a translational fusion to phage coat protein III. This pool of phages displaying the antibody library was later used for the selection of antigen binding entities.

### 2.3. Phage Display Based Selection of CD3-Specific Binders

[0646] The phage library carrying the cloned scFv-repertoire was harvested from the respective culture supernatant by PEG8000/NaCl precipitation and centrifugation. Approximately 10¹¹ to 10¹² scFv phage particles were resuspended in 0.4 ml of PBS/0.1% BSA and incubated with 10⁵ to 10⁷ Jurkat cells (a CD3-positive human T-cell line) for 1 hour on ice under slow agitation. These Jurkat cells were grown beforehand in RPMI medium enriched with fetal calf serum (10%), glutamine and penicillin/streptomycin, harvested by centrifugation, washed in PBS and resuspended in PBS/1% FCS (containing Na Azide). scFv phage which do not specifically bind to the Jurkat cells were eliminated by up to five washing steps with PBS/1% FCS (containing Na Azide). After washing, binding entities were eluted from the cells by resuspending the cells in HCl-glycine pH 2.2 (10 min incubation with subsequent vortexing) and after neutralization with 2 M Tris pH 12, the eluate was used for infection of a fresh uninfected E. coli XL1 Blue culture (OD600>0.5). The E. coli culture containing E. coli cells successfully transduced with a phagemid copy, encoding a human scFv-fragment, were again selected for carbenicillin resistance and subsequently infected with VCMS 13 helper phage to start the second round of antibody display and in vitro selection. A total of 4 to 5 rounds of selections were carried out, normally.

### 2.4. Screening for CD3-Specific Binders

[0647] Plasmid DNA corresponding to 4 and 5 rounds of panning was isolated from E. coli cultures after selection. For the production of soluble scFv-protein, VH-VL-DNA fragments were excised from the plasmids (XhoI-SpeI). These fragments were cloned via the same restriction sites in the plasmid pComb3H5BFlag/His differing from the original pComb3H5BHis in that the expression construct (e.g. scFv) includes a Flag-tag (TGD YKDDDDK) between the scFv and the His6-tag and the additional phage proteins were deleted. After ligation, each pool (different rounds of panning) of plasmid DNA was transformed into 100 μl heat shock competent E. coli TG1 or XLI blue and plated onto carbenicillin LB-agar. Single colonies were picked into 100 ul of LB carb (50 ug/ml). E. coli transformed with pComb3H5BHis containing a VL- and VH-segment produce soluble scFv in sufficient amounts after excision of the gene III fragment and induction with 1 mM IPTG. Due to a suitable signal sequence, the scFv-chain was exported into the periplasma where it folds into a functional conformation. Single E. coli TG1 bacterial colonies from the transformation plates were picked for periplasmic small scale preparations and grown in SB-medium (e.g. 10 ml) supplemented with 20 mM MgCl2 and carbenicillin 50 μg/ml (and re-dissolved in PBS (e.g. 1 ml) after harvesting. By four rounds of freezing at −70° C. and thawing at 37° C., the outer membrane of the bacteria was destroyed by temperature shock and the soluble periplasmic proteins including the scFvs were released into the supernatant. After elimination of intact cells and cell-debris by centrifugation, the supernatant containing the human anti-human CD3-scFvs was collected and used for further examination.

### 2.5. Identification of CD3-Specific Binders

[0648] Binding of the isolated scFvs was tested by flow cytometry on eukaryotic cells, which on their surface express a heterologous protein displaying at its N-terminus the first 27 N-terminal amino acids of CD3epsilon.

[0649] As described in Example 4, the first amino acids 1-27 of the N-terminal sequence of the mature CD3 epsilon chain of the human T cell receptor complex (amino acid sequence: QDGNEEMGGITQTPYKVSISGTTVILT SEQ ID NO: 2) were fused to the N-terminus of the transmembrane protein EpCAM so that the N-terminus was located at the outer cell surface. Additionally, a FLAG epitope was inserted between the N-terminal 1-27 CD3epsilon sequence and the EpCAM sequence. This fusion product was expressed in human embryonic kidney (HEK) and chinese hamster ovary (CHO) cells.

[0650] Eukaryotic cells displaying the 27 most N-terminal amino acids of mature CD3epsilon of other primate species were prepared in the same way for Saimiri ciureus (Squirrel monkey) (CD 3 epsilon N-terminal amino acid sequence: QDGNEEIGDTTQNPYKVSISGTTVTLT SEQ ID NO: 8), for Callithrix jacchus (CD 3 epsilon N-terminal amino acid sequence: QDGNEEMGDTTQNPYKVSISGTTVTLT SEQ ID NO: 4) and for Saguinus oedipus (CD 3 epsilon N-terminal amino acid sequence: QDGNEEMGDTTQNPYKVSISGTTVTLT SEQ ID NO: 6).

[0651] For flow cytometry 2,5×10⁵ cells are incubated with 50 ul supernatant or with 5 μg/ml of the purified constructs in 50 μl PBS with 2% FCS. The binding of the constructs was detected with an anti-His antibody (Penta-His Antibody, BSA free, Qiagen GmbH, Hilden, FRG) at 2 μg/ml in 50 μl PBS with 2% FCS. As a second step reagent a R-Phycoerythrin-conjugated affinity purified F(ab′)2 fragment, goat anti-mouse IgG (Fc-gamma fragment specific), diluted 1:100 in 50 μl PBS with 2% FCS (Dianova, Hamburg, FRG) was used. The samples were measured on a FACSscan (BD biosciences, Heidelberg, FRG).

[0652] Binding was always confirmed by flowcytometry as described in the foregoing paragraph on primary T cells of man and different primates (e.g. saimiris ciureus, callithrix jacchus, saguinus oedipus).

2.6. Generation of Human/Humanized Equivalents of Non-Human CD3Epsilon Specific scFvs

[0653] The VH region of the murine anti-CD3 scFv was aligned against human antibody germline amino acid sequences. The human antibody germline VH sequence was chosen which has the closest homology to the non-human VH and a direct alignment of the two amino acid sequences was performed. There were a number of framework residues of the non-human VH that differ from the human VH framework regions (“different framework positions”). Some of these residues may contribute to the binding and activity of the antibody to its target.

[0654] To construct a library that contain the murine CDRs and at every framework position that differs from the chosen human VH sequence both possibilities (the human and the maternal murine amino acid residue), degenerated oligonucleotides were synthesized. These oligonucleotides incorporate at the differing positions the human residue with a probability of 75% and the murine residue with a probability of 25%. For one human VH e.g. six of these oligonucleotides had to be synthesized that overlap in a terminal stretch of approximately 20 nucleotides. To this end every second primer was an antisense primer. Restriction sites needed for later cloning within the oligonucleotides were deleted.

[0655] These primers may have a length of 60 to 90 nucleotides, depending on the number of primers that were needed to span over the whole V sequence.

[0656] These e.g. six primers were mixed in equal amounts (e.g. 1 μl of each primer (primer stocks 20 to 100 μM) to a 20 μl PCR reaction) and added to a PCR mix consisting of PCR buffer, nucleotides and Taq polymerase. This mix was incubated at 94° C. for 3 minutes, 65° C. for 1 minute, 62° C. for 1 minute, 59° C. for 1 minute, 56° C. for 1 minute, 52° C. for 1 minute, 50° C. for 1 minute and at 72° C. for 10 minutes in a PCR cycler. Subsequently the product was run in an agarose gel electrophoresis and the product of a size from 200 to 400 isolated from the gel according to standard methods.

[0657] This PCR product was then used as a template for a standard PCR reaction using primers that incorporate N-terminal and C-terminal suitable cloning restriction sites. The DNA fragment of the correct size (for a VH approximately 350 nucleotides) was isolated by agarose gel electrophoresis according to standard methods. In this way sufficient VH DNA fragment was amplified. This VH fragment was now a pool of VH fragments that have each one a different amount of human and murine residues at the respective differing framework positions (pool of humanized VH). The same procedure was performed for the VL region of the murine anti-CD3 scFv (pool of humanized VL).

[0658] The pool of humanized VH was then combined with the pool of humanized VL in the phage display vector pComb3H5Bhis to form a library of functional scFvs from which—after display on filamentous phage—anti-CD3 binders were selected, screened, identified and confirmed as described above for the parental non-human (murine) anti-CD3 scFv. Single clones were then analyzed for favorable properties and amino acid sequence. Those scFvs which were closest in amino acid sequence homology to human germline V-segments are preferred particularly those wherein at least one CDR among CDR I and II of VH and CDR I and II of VLkappa or CDR I and II of VLlambda shows more than 80% amino acid sequence identity to the closest respective CDR of all human germline V-segments. Anti-CD3 scFvs were converted into recombinant bispecific single chain antibodies as described in the following Examples 9, 16, and 24.

### 3. Generation of a Recombinant Fusion Protein of the N-Terminal Amino Acids 1-27 of the Human CD3 Epsilon Chain Fused to the Fc-Part of an IgG1 (1-27 CD3-Fc)

### 3.1. Cloning and Expression of 1-27 CD3-Fc

[0659] The coding sequence of the 1-27 N-terminal amino acids of the human CD3 epsilon chain fused to the hinge and Fc gamma region of human immunoglobulin IgG1 as well as an 6 Histidine Tag were obtained by gene synthesis according to standard protocols (cDNA sequence and amino acid sequence of the recombinant fusion protein are listed under SEQ ID NOs 230 and 229). The gene synthesis fragment was designed as to contain first a Kozak site for eukaryotic expression of the construct, followed by an 19 amino acid immunoglobulin leader peptide, followed in frame by the coding sequence of the first 27 amino acids of the extracellular portion of the mature human CD3 epsilon chain, followed in frame by the coding sequence of the hinge region and Fc gamma portion of human IgG1, followed in frame by the coding sequence of a 6 Histidine tag and a stop codon (FIG. 1). The gene synthesis fragment was also designed as to introduce restriction sites at the beginning and at the end of the cDNA coding for the fusion protein. The introduced restriction sites, EcoRI at the 5′ end and SalI at the 3′ end, are utilized in the following cloning procedures. The gene synthesis fragment was cloned via EcoRI and SalI into a plasmid designated pEF-DHFR (pEF-DHFR is described in Mack et al. Proc. Natl. Acad. Sci. USA 92 (1995) 7021-7025 and Raum et al. Cancer Immunol Immunother 50 (2001) 141-150) following standard protocols. A sequence verified plasmid was used for transfection in the FreeStyle 293 Expression System (Invitrogen GmbH, Karlsruhe, Germany) according to the manufacturers protocol. After 3 days cell culture supernatants of the transfectants were harvested and tested for the presence of the recombinant construct in an ELISA assay. Goat anti-human IgG, Fc-gamma fragment specific antibody (obtained from Jackson ImmunoResearch Europe Ltd., Newmarket, Suffolk, UK) was diluted in PBS to 5 μg/ml and coated with 100 μl per well onto a MaxiSorp 96-well ELISA plate (Nunc GmbH & Co. KG, Wiesbaden, Germany) over night at 4° C. Wells were washed with PBS with 0.05% Tween 20 (PBS/Tween and blocked with 3% BSA in PBS (bovine Albumin, fraction V, Sigma-Aldrich Chemie GmbH, Taufkirchen, Germany) for 60 minutes at room temperature (RT). Subsequently, wells were washed again PBS/Tween and then incubated with cell culture supernatants for 60 minutes at RT. After washing wells were incubated with a peroxidase conjugated anti-His6 antibody (Roche Diagnostics GmbH, Roche Applied Science, Mannheim, Germany) diluted 1:500 in PBS with 1% BSA for 60 minutes at RT. Subsequently, wells were washed with 200 μl PBS/Tween and 100 μl of the SIGMAFAST OPD (SIGMAFAST OPD [o-Phenylenediamine dihydrochloride] substrate solution (Sigma-Aldrich Chemie GmbH, Taufkirchen, Germany) was added according to the manufacturers protocol. The reaction was stopped by adding 100 μl M H₂SO₄. Color reaction was measured on a PowerWaveX microplate spectrophotometer (BioTek Instruments, Inc., Winooski, Vt., USA) at 490 nm and subtraction of background absorption at 620 nm. As shown in FIG. 2 presence of the construct as compared to irrelevant supernatant of mock-transfected HEK 293 cells used as negative control was clearly detectable.

### 3.2. Binding Assay of Cross-Species Specific Single Chain Antibodies to 1-27 CD3-Fc.

[0660] Binding of crude preparations of periplasmatically expressed cross-species specific single chain antibodies specific for CD3 epsilon to 1-27 CD3-Fc was tested in an ELISA assay. Goat anti-human IgG, Fc-gamma fragment specific antibody (Jackson ImmunoResearch Europe Ltd., Newmarket, Suffolk, UK) was diluted in PBS to 5 μg/ml and coated with 100 μl per well onto a MaxiSorp 96-well ELISA plate (Nunc GmbH & Co. KG, Wiesbaden, Germany) over night at 4° C. Wells were washed with PBS with 0.05% Tween 20 (PBS/Tween and blocked with PBS with 3% BSA (bovine Albumin, fraction V, Sigma-Aldrich Chemie GmbH, Taufkirchen, Germany) for 60 minutes at RT. Subsequently, wells were washed with PBS/Tween and incubated with supernatants of cells expressing the 1-27 CD3-Fc construct for 60 minutes at RT. Wells were washed with PBS/Tween and incubated with crude preparations of periplasmatically expressed cross-species specific single-chain antibodies as described above for 60 minutes at room temperature. After washing with PBS/Tween wells were incubated with peroxidase conjugated anti-Flag M2 antibody (Sigma-Aldrich Chemie GmbH, Taufkirchen, Germany) diluted 1:10000 in PBS with 1% BSA for 60 minutes at RT. Wells were washed with PBS/Tween and incubated with 100 μl of the SIGMAFAST OPD (OPD [o-Phenylenediamine dihydrochloride] substrate solution (Sigma-Aldrich Chemie GmbH, Taufkirchen, Germany) according to the manufacturers protocol. Color reaction was stopped with 100 μl 1 M H₂SO₄ and measured on a PowerWaveX microplate spectrophotometer (BioTek Instruments, Inc., Winooski, Vt., USA) at 490 nm and subtraction of background absorption at 620 nm. Strong binding of cross-species specific human single chain antibodies specific for CD3 epsilon to the 1-27 CD3-Fc construct compared to a murine anti CD3 single-chain antibody was observed (FIG. 3).

### 4. Generation of Recombinant Transmembrane Fusion Proteins of the N-Terminal Amino Acids 1-27 of CD3 Epsilon from Different Non-Chimpanzee Primates Fused to EpCAM from Cynomolgus Monkey (1-27 CD3-EpCAM)

### 4.1. Cloning and Expression of 1-27 CD3-EpCAM

[0661] CD3 epsilon was isolated from different non-chimpanzee primates (marmoset, tamarin, squirrel monkey) and swine. The coding sequences of the 1-27 N-terminal amino acids of CD3 epsilon chain of the mature human, common marmoset (Callithrix jacchus), cottontop tamarin (Saguinus oedipus), common squirrel monkey (Saimiri sciureus) and domestic swine (Sus scrofa; used as negative control) fused to the N-terminus of Flag tagged cynomolgus EpCAM were obtained by gene synthesis according to standard protocols. cDNA sequence and amino acid sequence of the recombinant fusion proteins are listed under SEQ ID NOs 231 to 240). The gene synthesis fragments were designed as to contain first a BsrGI site to allow fusion in correct reading frame with the coding sequence of a 19 amino acid immunoglobulin leader peptide already present in the target expression vector, which is followed in frame by the coding sequence of the N-terminal 1-27 amino acids of the extracellular portion of the mature CD3 epsilon chains, which is followed in frame by the coding sequence of a Flag tag and followed in frame by the coding sequence of the mature cynomolgus EpCAM transmembrane protein (FIG. 4). The gene synthesis fragments were also designed to introduce a restriction site at the end of the cDNA coding for the fusion protein. The introduced restriction sites BsrGI at the 5′ end and SalI at the 3′ end, were utilized in the following cloning procedures. The gene synthesis fragments were then cloned via BsrGI and SalI into a derivative of the plasmid designated pEF DHFR (pEF-DHFR is described in Mack et al. Proc. Natl. Acad. Sci. USA 92 (1995) 7021-7025), which already contained the coding sequence of the 19 amino acid immunoglobulin leader peptide following standard protocols. Sequence verified plasmids were used to transiently transfect 293-HEK cells using the MATra-A Reagent (IBA GmbH, Gottingen, Germany) and 12 μg of plasmid DNA for adherent 293-HEK cells in 175 ml cell culture flasks according to the manufacturers protocol. After 3 days of cell culture the transfectants were tested for cell surface expression of the recombinant transmembrane protein via an FACS assay according to standard protocols. For that purpose a number of 2.5×10⁵ cells were incubated with the anti-Flag M2 antibody (Sigma-Aldrich Chemie GmbH, Taufkirchen, Germany) at 5 μg/ml in PBS with 2% FCS. Bound antibody was detected with an R-Phycoerythrin-conjugated affinity purified F(ab′)2 fragment, goat anti-mouse IgG, Fc-gamma fragment specific 1:100 in PBS with 2% FCS (Jackson ImmunoResearch Europe Ltd., Newmarket, Suffolk, UK). The samples were measured on a FACScalibur (BD biosciences, Heidelberg, Germany). Expression of the Flag tagged recombinant transmembrane fusion proteins consisting of cynomolgus EpCAM and the 1-27 N-terminal amino acids of the human, marmoset, tamarin, squirrel monkey and swine CD3 epsilon chain respectively on transfected cells was clearly detectable (FIG. 5).

### 4.2. Binding of Cross-Species Specific Anti-CD3 Single Chain Antibodies to the 1-27 CD3-EpCAM

[0662] Binding of crude preparations of periplasmatically expressed cross-species specific anti CD3 single-chain antibodies to the 1-27 N-terminal amino acids of the human, marmoset, tamarin and squirrel monkey CD3 epsilon chains respectively fused to cynomolgus Ep-CAM was tested in an FACS assay according to standard protocols. For that purpose a number of 2.5×10⁵ cells were incubated with crude preparations of periplasmatically expressed cross-species specific anti CD3 single-chain antibodies (preparation was performed as described above and according to standard protocols) and a single-chain murine anti-human CD3 antibody as negative control. As secondary antibody the Penta-His antibody (Qiagen GmbH, Hildesheim, Germany) was used at 5 μg/ml in 50 μl PBS with 2% FCS. The binding of the antibody was detected with an R-Phycoerythrin-conjugated affinity purified F(ab′)2 fragment, goat anti-mouse IgG, Fc-gamma fragment specific, diluted 1:100 in PBS with 2% FCS (Jackson ImmunoResearch Europe Ltd., Newmarket, Suffolk, UK). The samples were measured on a FACScalibur (BD biosciences, Heidelberg, Germany). As shown in FIGS. 6 (A to E) binding of single chain antibodies to the transfectants expressing the recombinant transmembrane fusion proteins consisting of the 1-27 N-terminal amino acids of CD3 epsilon of the human, marmoset, tamarin or squirrel monkey fused to cynomolgus EpCAM was observed. No binding of cross-species specific single chain antibodies was observed to a fusion protein consisting of the 1-27 N-terminal CD3 epsilon of swine fused to cynomolgus EpCAM used as negative control. Multi-primate cross-species specificity of the anti-CD3 single chain antibodies was shown. Signals obtained with the anti Flag M2 antibody and the cross-species specific single chain antibodies were comparable, indicating a strong binding activity of the cross-species specific single chain antibodies to the N-terminal amino acids 1-27 of CD3 epsilon.

### 5. Binding Analysis of Cross-Species Specific Anti-CD3 Single Chain Antibodies by Alanine-Scanning of Mouse Cells Transfected with the Human CD3 Epsilon Chain and its Alanine Mutants

### 5.1. Cloning and Expression of Human Wild-Type CD3 Epsilon

[0663] The coding sequence of the human CD3 epsilon chain was obtained by gene synthesis according to standard protocols (cDNA sequence and amino acid sequence of the human CD3 epsilon chain are listed under SEQ ID NOs 242 and 241). The gene synthesis fragment was designed as to contain a Kozak site for eukaryotic expression of the construct and restriction sites at the beginning and the end of the cDNA coding for human CD3 epsilon. The introduced restriction sites EcoRI at the 5′ end and SalI at the 3′ end, were utilized in the following cloning procedures. The gene synthesis fragment was then cloned via EcoRI and SalI into a plasmid designated pEF NEO following standard protocols. pEF NEO was derived of pEF DHFR (Mack et al. Proc. Natl. Acad. Sci. USA 92 (1995) 7021-7025) by replacing the cDNA of the DHFR with the cDNA of the neomycin resistance by conventional molecular cloning. A sequence verified plasmid was used to transfect the murine T cell line EL4 (ATCC No. TIB-39) cultivated in RPMI with stabilized L-glutamine supplemented with 10% FCS, 1% penicillin/streptomycin, 1% HEPES, 1% pyruvate, 1% non-essential amino acids (all Biochrom AG Berlin, Germany) at 37° C., 95% humidity and 7% CO₂. Transfection was performed with the SuperFect Transfection Reagent (Qiagen GmbH, Hilden, Germany) and 2 μg of plasmid DNA according to the manufacturer's protocol. After 24 hours the cells were washed with PBS and cultivated again in the aforementioned cell culture medium with 600 μg/ml G418 for selection (PAA Laboratories GmbH, Pasching, Austria). 16 to 20 days after transfection the outgrowth of resistant cells was observed. After additional 7 to 14 days cells were tested for expression of human CD3 epsilon by FACS analysis according to standard protocols. 2.5×10⁵ cells were incubated with anti-human CD3 antibody UCHT-1 (BD biosciences, Heidelberg, Germany) at 5 μg/ml in PBS with 2% FCS. The binding of the antibody was detected with an R-Phycoerythrin-conjugated affinity purified F(ab′)2 fragment, goat anti-mouse IgG, Fc-gamma fragment specific, diluted 1:100 in PBS with 2% FCS (Jackson ImmunoResearch Europe Ltd., Newmarket, Suffolk, UK). The samples were measured on a FACSCalibur (BD biosciences, Heidelberg, Germany). Expression of human wild-type CD3 on transfected EL4 cells is shown in FIG. 7.

### 5.2. Cloning and Expression of the Cross-Species Specific Anti-CD3 Single Chain Antibodies as IgG1 Antibodies

[0664] In order to provide improved means of detection of binding of the cross-species specific single chain anti-CD3 antibodies H2C HLP, A2J HLP and E2M HLP were converted into IgG1 antibodies with murine IgG1 and human lambda constant regions. cDNA sequences coding for the heavy and light chains of respective IgG antibodies were obtained by gene synthesis according to standard protocols. The gene synthesis fragments for each specificity were designed as to contain first a Kozak site to allow eukaryotic expression of the construct, which is followed by an 19 amino acid immunoglobulin leader peptide (SEQ ID NOs 244 and 243), which is followed in frame by the coding sequence of the respective heavy chain variable region or respective light chain variable region, followed in frame by the coding sequence of the heavy chain constant region of murine IgG1 (SEQ ID NOs 246 and 245) or the coding sequence of the human lambda light chain constant region (SEQ ID NO 248 and 247), respectively. Restriction sites were introduced at the beginning and the end of the cDNA coding for the fusion protein. Restriction sites EcoRI at the 5′ end and SalI at the 3′ end were used for the following cloning procedures. The gene synthesis fragments were cloned via EcoRI and SalI into a plasmid designated pEF DHFR (Mack et al. Proc. Natl. Acad. Sci. USA 92 (1995) 7021-7025) for the heavy chain constructs and pEF ADA (pEF ADA is described in Raum et al., Cancer Immuno) Immunother., 50(3), (2001), 141-50) for the light chain constructs) according to standard protocols. Sequence verified plasmids were used for co-transfection of respective light and heavy chain constructs in the FreeStyle 293 Expression System (Invitrogen GmbH, Karlsruhe, Germany) according to the manufacturers protocol. After 3 days cell culture supernatants of the transfectants were harvested and used for the alanine-scanning experiment.

### 5.3. Cloning and Expression of Alanine Mutants of Human CD3 Epsilon for Alanine-Scanning

[0665] 27 cDNA fragments coding for the human CD3 epsilon chain with an exchange of one codon of the wild-type sequence of human CD3 epsilon into a codon coding for alanine (GCC) for each amino acid of amino acids 1-27 of the extracellular domain of the mature human CD3 epsilon chain respectively were obtained by gene synthesis. Except for the exchanged codon the cDNA fragments were identical to the aforementioned human wild-type CD3 cDNA fragment. Only one codon was replaced in each construct compared to the human wild-type CD3 cDNA fragment described above. Restriction sites EcoRI and SalI were introduced into the cDNA fragments at identical positions compared to the wild-type construct. All alanine-scanning constructs were cloned into pEF NEO and sequence verified plasmids were transfected into EL4 cells. Transfection and selection of transfectants was performed as described above. As result a panel of expressed constructs was obtained wherein the first amino acid of the human CD3 epsilon chain, glutamine (Q, Gln) at position 1 was replaced by alanine. The last amino acid replaced by alanine was the threonine (T, Thr) at position 27 of mature human wild-type CD3 epsilon. For each amino acid between glutamine 1 and threonine 27 respective transfectants with an exchange of the wild-type amino acid into alanine were generated.

### 5.4. Alanine-Scanning Experiment

[0666] Chimeric IgG antibodies as described in 5.2 and cross-species specific single chain antibodies specific for CD3 epsilon were tested in alanine-scanning experiment. Binding of the antibodies to the EL4 cell lines transfected with the alanine-mutant constructs of human CD3 epsilon as described in 5.3 was tested by FACS assay according to standard protocols. 2.5×10⁵ cells of the respective transfectants were incubated with 50 μl of cell culture supernatant containing the chimeric IgG antibodies or with 50 μl of crude preparations of periplasmatically expressed single-chain antibodies. For samples incubated with crude preparations of periplasmatically expressed single-chain antibodies the anti-Flag M2 antibody (Sigma-Aldrich Chemie GmbH, Taufkirchen, Germany) was used as secondary antibody at 5 μg/ml in 50 μl PBS with 2% FCS. For samples incubated with the chimeric IgG antibodies a secondary antibody was not necessary. For all samples the binding of the antibody molecules was detected with an R-Phycoerythrin-conjugated affinity purified F(ab′)2 fragment, goat anti-mouse IgG, Fc-gamma fragment specific, diluted 1:100 in PBS with 2% FCS (Jackson ImmunoResearch Europe Ltd., Newmarket, Suffolk, UK). Samples were measured on a FACSCalibur (BD biosciences, Heidelberg, Germany). Differential binding of chimeric IgG molecules or cross-species specific single-chain antibodies to the EL4 cell lines transfected with the alanine-mutants of human CD3 epsilon was detected. As negative control either an isotype control or a crude preparation of a periplasmatically expressed single-chain antibody of irrelevant specificity was used respectively. UCHT-1 antibody was used as positive control for the expression level of the alanine-mutants of human CD3 epsilon. The EL4 cell lines transfected with the alanine-mutants for the amino acids tyrosine at position 15, valine at position 17, isoleucine at position 19, valine at position 24 or leucine at position 26 of the mature CD3 epsilon chain were not evaluated due to very low expression levels (data not shown). Binding of the cross-species specific single chain antibodies and the single chain antibodies in chimeric IgG format to the EL4 cell lines transfected with the alanine-mutants of human CD3 epsilon is shown in FIG. 8 (A-D) as relative binding in arbitrary units with the geometric mean fluorescence values of the respective negative controls subtracted from all respective geometric mean fluorescence sample values. To compensate for different expression levels all sample values for a certain transfectant were then divided through the geometric mean fluorescence value of the UCHT-1 antibody for the respective transfectant. For comparison with the wild-type sample value of a specificity all sample values of the respective specificity were finally divided through the wild-type sample value, thereby setting the wild-type sample value to 1 arbitrary unit of binding. The calculations used are shown in detail in the following formula:

$$value\_Sample ( x , y ) = \frac{Sample ( x , y ) - neg\_Contr . ( x )}{\begin{matrix}( U C H T - 1 ( x ) - neg\_Contr . ( x ) ) * \\ \frac{WT ( y ) - neg\_Contr . ( wt )}{U C H T - 1 ( wt ) - neg\_Contr . ( wt )}\end{matrix}}$$

[0667] In this equation value_Sample means the value in arbitrary units of binding depicting the degree of binding of a specific anti-CD3 antibody to a specific alanine-mutant as shown in FIG. 8 (A-D), Sample means the geometric mean fluorescence value obtained for a specific anti-CD3 antibody assayed on a specific alanine-scanning transfectant, neg_Contr. means the geometric mean fluorescence value obtained for the negative control assayed on a specific alanine-mutant, UCHT-1 means the geometric mean fluorescence value obtained for the UCHT-1 antibody assayed on a specific alanine-mutant, WT means the geometric mean fluorescence value obtained for a specific anti-CD3 antibody assayed on the wild-type transfectant, x specifies the respective transfectant, y specifies the respective anti-CD3 antibody and wt specifies that the respective transfectant is the wild-type.

[0668] As can be seen in FIG. 8 (A-D) the IgG antibody A2J HLP showed a pronounced loss of binding for the amino acids asparagine at position 4, threonine at position 23 and isoleucine at position 25 of the mature CD3 epsilon chain. A complete loss of binding of IgG antibody A2J HLP was observed for the amino acids glutamine at position 1, aspartate at position 2, glycine at position 3 and glutamate at position 5 of the mature CD3 epsilon chain. IgG antibody E2M HLP showed a pronounced loss of binding for the amino acids asparagine at position 4, threonine at position 23 and isoleucine at position 25 of the mature CD3 epsilon chain. IgG antibody E2M HLP showed a complete loss of binding for the amino acids glutamine at position 1, aspartate at position 2, glycine at position 3 and glutamate at position 5 of the mature CD3 epsilon chain. IgG antibody H2C HLP showed an intermediate loss of binding for the amino acid asparagine at position 4 of the mature CD3 epsilon chain and it showed a complete loss of binding for the amino acids glutamine at position 1, aspartate at position 2, glycine at position 3 and glutamate at position 5 of the mature CD3 epsilon chain. Single chain antibody F12Q HLP showed an essentially complete loss of binding for the amino acids glutamine at position 1, aspartate at position 2, glycine at position 3 of the mature CD3 epsilon chain and glutamate at position 5 of the mature CD3 epsilon chain.

### 6. Binding Analysis of the Cross-Species Specific Anti-CD3 Binding Molecule H2C HLP to the Human CD3 Epsilon Chain with and without N-Terminal His6 Tag Transfected into the Murine T Cell Line EL4

[0669] 6.1. Cloning and Expression of the Human CD3 Epsilon Chain with N-Terminal Six Histidine Tag (His6 Tag)

[0670] A cDNA fragment coding for the human CD3 epsilon chain with a N-terminal His6 tag was obtained by gene synthesis. The gene synthesis fragment was designed as to contain first a Kozak site for eukaryotic expression of the construct, which is followed in frame by the coding sequence of a 19 amino acid immunoglobulin leader peptide, which is followed in frame by the coding sequence of a His6 tag which is followed in frame by the coding sequence of the mature human CD3 epsilon chain (the cDNA and amino acid sequences of the construct are listed as SEQ ID NOs 256 and 255). The gene synthesis fragment was also designed as to contain restriction sites at the beginning and the end of the cDNA. The introduced restriction sites EcoRI at the 5′ end and SalI at the 3′ end, were used in the following cloning procedures. The gene synthesis fragment was then cloned via EcoRI and SalI into a plasmid designated pEF-NEO (as described above) following standard protocols. A sequence verified plasmid was used to transfect the murine T cell line EL4. Transfection and selection of the transfectants were performed as described above. After 34 days of cell culture the transfectants were used for the assay described below.

6.2. Binding of the Cross-Species Specific Anti-CD3 Binding Molecule H2C HLP to the Human CD3 Epsilon Chain with and without N-Terminal His6 Tag

[0671] A chimeric IgG antibody with the binding specificity H2C HLP specific for CD3 epsilon was tested for binding to human CD3 epsilon with and without N-terminal His6 tag. Binding of the antibody to the EL4 cell lines transfected the His6-human CD3 epsilon and wild-type human CD3 epsilon respectively was tested by an FACS assay according to standard protocols. 2.5×10⁵ cells of the transfectants were incubated with 50 μl of cell culture supernatant containing the chimeric IgG antibody or 50 μl of the respective control antibodies at 5 μg/ml in PBS with 2% FCS. As negative control an appropriate isotype control and as positive control for expression of the constructs the CD3 specific antibody UCHT-1 were used respectively. The binding of the antibodies was detected with a R-Phycoerythrin-conjugated affinity purified F(ab′)2 fragment, goat anti-mouse IgG, Fc-gamma fragment specific, diluted 1:100 in PBS with 2% FCS (Jackson ImmunoResearch Europe Ltd., Newmarket, Suffolk, UK).

[0672] Samples were measured on a FACSCalibur (BD biosciences, Heidelberg, Germany). Compared to the EL4 cell line transfected with wild-type human CD3 epsilon a clear loss of binding of the chimeric IgG with binding specificity H2C HLP to human-CD3 epsilon with an N-terminal His6 tag was detected. These results showed that a free N-terminus of CD3 epsilon is essential for binding of the cross-species specific anti-CD3 binding specificity H2C HLP to the human CD3 epsilon chain (FIG. 9).

### 7. Cloning and Expression of the C-Terminal, Transmembrane and Truncated Extracellular Domains of Human MCSP

[0673] The coding sequence of the C-terminal, transmembrane and truncated extracellular domain of human MCSP (amino acids 1538-2322) was obtained by gene synthesis according to standard protocols (cDNA sequence and amino acid sequence of the recombinant construct for expression of the C-terminal, transmembrane and truncated extracellular domain of human MCSP (designated as human D3) are listed under SEQ ID NOs 250 and 249). The gene synthesis fragment was designed as to contain first a Kozak site to allow eukaryotic expression of the construct followed by the coding sequence of an 19 amino acid immunoglobulin leader peptide followed in frame by a FLAG tag, followed in frame by a sequence containing several restriction sites for cloning purposes and coding for a 9 amino acid artificial linker (SRTRSGSQL), followed in frame by the coding sequence of the C-terminal, transmembrane and truncated extracellular domain of human MCSP and a stop codon. Restriction sites were introduced at the beginning and at the end of the DNA fragment. The restriction sites EcoRI at the 5′ end and SalI at the 3′ end were used in the following cloning procedures. The fragment was digested with EcoRI and SalI and cloned into pEF-DHFR (pEF-DHFR is described in Mack et al. Proc. Natl. Acad. Sci. USA 92 (1995) 7021-7025) following standard protocols. A sequence verified plasmid was used to transfect CHO/dhfr-cells (ATCC No. CRL 9096). Cells were cultivated in RPMI 1640 with stabilized glutamine, supplemented with 10% FCS, 1% penicillin/streptomycin (all obtained from Biochrom AG Berlin, Germany) and nucleosides from a stock solution of cell culture grade reagents (Sigma-Aldrich Chemie GmbH, Taufkirchen, Germany) to a final concentration of 10 μg/ml Adenosine, 10 μg/ml Deoxyadenosine and 10 μg/ml Thymidine, in an incubator at 37° C., 95% humidity and 7% CO₂. Transfection was performed using the PolyFect Transfection Reagent (Qiagen GmbH, Hilden, Germany) and 5 μg of plasmid DNA according to the manufacturer's protocol. After cultivation for 24 hours cells were washed once with PBS and cultivated again in RPMI 1640 with stabilized glutamine and 1% penicillin/streptomycin. Thus the cell culture medium did not contain nucleosides and thereby selection was applied on the transfected cells. Approximately 14 days after transfection the outgrowth of resistant cells was observed. After an additional 7 to 14 days the transfectants were tested for expression of the construct by FACS analysis. 2.5×10⁵ cells were incubated with 50 μl of an anti-Flag-M2 antibody (Sigma-Aldrich Chemie GmbH, Taufkirchen, Germany) diluted to 5 μg/ml in PBS with 2% FCS. The binding of the antibody was detected with a R-Phycoerythrin-conjugated affinity purified F(ab′)2 fragment, goat anti-mouse IgG, Fc-gamma fragment specific diluted 1:100 in PBS with 2% FCS (ImmunoResearch Europe Ltd., Newmarket, Suffolk, UK). The samples were measured on a FACScalibur (BD biosciences, Heidelberg, Germany).

### 8. Cloning and Expression of the C-Terminal, Transmembrane and Truncated Extracellular Domains of Macaque MCSP

[0674] The cDNA sequence of the C-terminal, transmembrane and truncated extracellular domains of macaque MCSP (designated as macaque D3) was obtained by a set of three PCRs on macaque skin cDNA (Cat No. C1534218-Cy-BC; BioCat GmbH, Heidelberg, Germany) using the following reaction conditions: 1 cycle at 94° C., 3 min., 40 cycles with 94° C. for 0.5 min., 52° C. for 0.5 min. and 72° C. for 1.75 min., terminal cycle of 72° C. for 3 min. The following primers were used:

(SEQ ID No. 361)
forward primer: 5′-GATCTGGTCTACACCATCGAGC-3′
(SEQ ID No. 362)
reverse primer: 5′-GGAGCTGCTGCTGGCTCAGTGAGG-3′
(SEQ ID No. 363)
forward primer: 5′-TTCCAGCTGAGCATGTCTGATGG-3′
(SEQ ID No. 364)
reverse primer: 5′-CGATCAGCATCTGGGCCCAGG-3′
(SEQ ID No. 365)
forward primer: 5′-GTGGAGCAGTTCACTCAGCAGGACC-3′
(SEQ ID No. 366)
reverse primer: 5′-GCCTTCACACCCAGTACTGGCC-3′

[0675] Those PCRs generated three overlapping fragments (A: 1-1329, B: 1229-2428, C: 1782-2547) which were isolated and sequenced according to standard protocols using the PCR primers and thereby provided a 2547 by portion of the cDNA sequence of macaque MCSP (the cDNA sequence and amino acid sequence of this portion of macaque MCSP are listed under SEQ ID NOs 252 and 251) from 74 by upstream of the coding sequence of the C-terminal domain to 121 by downstream of the stop codon. Another PCR using the following reaction conditions: 1 cycle at 94° C. for 3 min, 10 cycles with 94° C. for 1 min, 52° C. for 1 min and 72° C. for 2.5 min, terminal cycle of 72° C. for 3 min was used to fuse the PCR products of the aforementioned reactions A and B. The following primers are used:

| forward primer: | (SEQ ID No. 367) |
|---|---|
| 5′-tcccgtacgagatctggatcccaattggatggcggactcgtgctgttctcacacagagg-3′ | |
| reverse primer: | (SEQ ID No. 368) |

5′-agtgggtcgactcacacccagtactggccattcttaagggcaggg-3′

[0676] The primers for this PCR were designed to introduce restriction sites at the beginning and at the end of the cDNA fragment coding for the C-terminal, transmembrane and truncated extracellular domains of macaque MCSP. The introduced restriction sites MfeI at the 5′ end and SalI at the 3′ end, were used in the following cloning procedures. The PCR fragment was then cloned via MfeI and SalI into a Bluescript plasmid containing the EcoRI/MfeI fragment of the aforementioned plasmid pEF-DHFR (pEF-DHFR is described in Raum et al. Cancer Immunol Immunother 50 (2001) 141-150) by replacing the C-terminal, transmembrane and truncated extracellular domains of human MCSP. The gene synthesis fragment contained the coding sequences of the immunoglobulin leader peptide and the Flag tag as well as the artificial linker (SRTRSGSQL) in frame to the 5′ end of the cDNA fragment coding for the C-terminal, transmembrane and truncated extracellular domains of macaque MCSP. This vector was used to transfect CHO/dhfr-cells (ATCC No. CRL 9096). Cells were cultivated in RPMI 1640 with stabilized glutamine supplemented with 10% FCS, 1% penicillin/streptomycin (all from Biochrom AG Berlin, Germany) and nucleosides from a stock solution of cell culture grade reagents (Sigma-Aldrich Chemie GmbH, Taufkirchen, Germany) to a final concentration of 10 μg/ml Adenosine, 10 μg/ml Deoxyadenosine and 10 μg/ml Thymidine, in an incubator at 37° C., 95% humidity and 7% CO2. Transfection was performed with PolyFect Transfection Reagent (Qiagen GmbH, Hilden, Germany) and 5 μg of plasmid DNA according to the manufacturer's protocol. After cultivation for 24 hours cells were washed once with PBS and cultivated again in RPMI 1640 with stabilized glutamine and 1% penicillin/streptomycin. Thus the cell culture medium did not contain nucleosides and thereby selection was applied on the transfected cells. Approximately 14 days after transfection the outgrowth of resistant cells is observed. After an additional 7 to 14 days the transfectants were tested for expression of the recombinant construct via FACS. 2.5×10⁵ cells were incubated with 50 μl of an anti-Flag-M2 antibody (Sigma-Aldrich Chemie GmbH, Taufkirchen, Germany) diluted to 5 μg/ml in PBS with 2% FCS. Bound antibody was detected with a R-Phycoerythrin-conjugated affinity purified F(ab′)2 fragment, goat anti-mouse IgG, Fc-gamma fragment specific, diluted 1:100 in PBS with 2% FCS (Jackson ImmunoResearch Europe Ltd., Newmarket, Suffolk, UK). Samples were measured on a FACScalibur (BD biosciences, Heidelberg, Germany).

### 9. Generation and Characterisation of MCSP and CD3 Cross-Species Specific Bispecific Single Chain Molecules

[0677] Bispecific single chain antibody molecules each comprising a binding domain cross-species specific for human and non-chimpanzee primate CD3 epsilon as well as a binding domain cross-species-specific for human and non-chimpanzee primate MCSP, are designed as set out in the following Table 1:

TABLE 1
Formats of MCSP and CD3
cross-species specific
bispecific single
chain antibodies

| | Formats of |
|---|---|
| SEQ ID | protein constructs |
| (nucl/prot) | (N → C) |
| 190/189 | MCSP-G4 HL x H2C HL |
| 192/191 | MCSP-G4 HL x F12Q HL |
| 194/193 | MCSP-G4 HL x I2C HL |
| 196/195 | MCSP-G4 HLP x F6A HLP |
| 198/197 | MCSP-G4 HLP x H2C HLP |
| 202/201 | MCSP-G4 HLP x G4H HLP |
| 206/205 | MCSP-G4 HLP x E1L HLP |
| 208/207 | MCSP-G4 HLP x E2M HLP |
| 212/211 | MCSP-G4 HLP x F12Q HL |
| 214/213 | MCSP-G4 HLP x I2C HL |
| 216/215 | MCSP-D2 HL x H2C HL |
| 218/217 | MCSP-D2 HL x F12Q HL |
| 220/219 | MCSP-D2 HL x I2C HL |
| 222/221 | MCSP-D2 HLP x H2C HLP |
| 224/223 | MCSP-F9 HL x H2C HL |
| 226/225 | MCSP-F9 HLP x H2C HLP |
| 228/227 | MCSP-F9 HLP x G4H HLP |
| 318/317 | MCSP-A9 HL x H2C HL |
| 320/319 | MCSP-A9 HL x F12Q HL |
| 322/321 | MCSP-A9 HL x I2C HL |
| 324/323 | MCSP-C8 HL x I2C HL |
| 328/327 | MCSP-B7 HL x I2C HL |
| 326/325 | MCSP-B8 HL x I2C HL |
| 330/329 | MCSP-G8 HL x I2C HL |
| 332/331 | MCSP-D5 HL x I2C HL |
| 334/333 | MCSP-F7 HL x I2C HL |
| 336/335 | MCSP-G5 HL x I2C HL |
| 338/337 | MCSP-F8 HL x I2C HL |
| 340/339 | MCSP-G10 HL x I2C HL |

[0678] The aforementioned constructs containing the variable heavy-chain (VH) and variable light-chain (VL) domains cross-species specific for human and macaque MCSP D3 and the VH and VL domains cross-species specific for human and macaque CD3 were obtained by gene synthesis. The gene synthesis fragments were designed as to contain first a Kozak site for eukaryotic expression of the construct, followed by a 19 amino acid immunoglobulin leader peptide, followed in frame by the coding sequence of the respective bispecific single chain antibody molecule, followed in frame by the coding sequence of a histidine₆-tag and a stop codon. The gene synthesis fragment was also designed as to introduce suitable N- and C-terminal restriction sites. The gene synthesis fragment was cloned via these restriction sites into a plasmid designated pEF-DHFR (pEF-DHFR is described in Raum et al. Cancer Immunol Immunother 50 (2001) 141-150) according to standard protocols (Sambrook, Molecular Cloning; A Laboratory Manual, 3rd edition, Cold Spring Harbour Laboratory Press, Cold Spring Harbour, N.Y. (2001)). The constructs were transfected stably or transiently into DHFR-deficient CHO-cells (ATCC No. CRL 9096) by electroporation or alternatively into HEK 293 (human embryonal kidney cells, ATCC Number: CRL-1573) in a transient manner according to standard protocols. Eukaryotic protein expression in DHFR deficient CHO cells was performed as described by Kaufmann R. J. (1990) Methods Enzymol. 185, 537-566. Gene amplification of the constructs was induced by addition of increasing concentrations of methothrexate (MTX) up to final concentrations of 20 nM MTX. After two passages of stationary culture the cells were grown in roller bottles with nucleoside-free HyQ PF CHO liquid soy medium (with 4.0 mM L-Glutamine with 0.1% Pluronic F-68; HyClone) for 7 days before harvest. The cells were removed by centrifugation and the supernatant containing the expressed protein is stored at −20° C. Akta® Explorer System (GE Health Systems) and Unicorn® Software were used for chromatography. Immobilized metal affinity chromatography (“IMAC”) was performed using a Fractogel EMD Chelate® (Merck) which was loaded with ZnCl₂ according to the protocol provided by the manufacturer. The column was equilibrated with buffer A (20 mM sodium phosphate buffer pH 7.2, 0.1 M NaCl) and the cell culture supernatant (500 ml) was applied to the column (10 ml) at a flow rate of 3 ml/min. The column was washed with buffer A to remove unbound sample. Bound protein was eluted using a two step gradient of buffer B (20 mM sodium phosphate buffer pH 7.2, 0.1 M NaCl, 0.5 M Imidazole) according to the following:

Step 1: 20% buffer B in 6 column volumes
Step 2: 100% buffer B in 6 column volumes

[0679] Eluted protein fractions from step 2 were pooled for further purification. All chemicals are of research grade and purchased from Sigma (Deisenhofen) or Merck (Darmstadt).

[0680] Gel filtration chromatography was performed on a HiLoad 16/60 Superdex 200 prep grade column (GE/Amersham) equilibrated with Equi-buffer (25 mM Citrate, 200 mM Lysine, 5% Glycerol, pH 7.2). Eluted protein samples (flow rate 1 ml/min) were subjected to standard SDS-PAGE and Western Blot for detection. Prior to purification, the column was calibrated for molecular weight determination (molecular weight marker kit, Sigma MW GF-200). Protein concentrations were determined using OD280 nm.

[0681] Purified bispecific single chain antibody protein was analyzed in SDS PAGE under reducing conditions performed with pre-cast 4-12% Bis Tris gels (Invitrogen). Sample preparation and application were performed according to the protocol provided by the manufacturer. The molecular weight was determined with MultiMark protein standard (Invitrogen). The gel was stained with colloidal Coomassie (Invitrogen protocol). The purity of the isolated protein is >95% as determined by SDS-PAGE.

[0682] The bispecific single chain antibody has a molecular weight of about 52 kDa under native conditions as determined by gel filtration in phosphate buffered saline (PBS). All constructs were purified according to this method.

[0683] Western Blot was performed using an Optitran® BA-S83 membrane and the Invitrogen Blot Module according to the protocol provided by the manufacturer. For detection of the bispecific single chain antibody protein antibodies an anti-His Tag antibody was used (Penta His, Qiagen). A Goat-anti-mouse Ig antibody labeled with alkaline phosphatase (AP) (Sigma) was used as secondary antibody and BCIP/NBT (Sigma) as substrate. A single band was detected at 52 kD corresponding to the purified bispecific single chain antibody.

[0684] Alternatively, constructs were transiently expressed in DHFR deficient CHO cells. In brief, 4×105 cells per construct were cultivated in 3 ml RPMI 1640 all medium with stabilized glutamine supplemented with 10% fetal calf serum, 1% penicillin/streptomycin and nucleosides from a stock solution of cell culture grade reagents (Sigma-Aldrich Chemie GmbH, Taufkirchen, Germany) to a final concentration of 10 μg/ml Adenosine, 10 μg/ml Deoxyadenosine and 10 μg/ml Thymidine, in an incubator at 37° C., 95% humidity and 7% CO2 one day before transfection. Transfection was performed with Fugene 6 Transfection Reagent (Roche, #11815091001) according to the manufacturer's protocol. 94 μl OptiMEM medium (Invitrogen) and 6 μl Fugene 6 are mixed and incubated for 5 minutes at room temperature. Subsequently, 1.5 μg DNA per construct were added, mixed and incubated for 15 minutes at room temperature. Meanwhile, the DHFR deficient CHO cells were washed with 1×PBS and resuspended in 1.5 ml RPMI 1640 all medium. The transfection mix was diluted with 600 μl RPMI 1640 all medium, added to the cells and incubated overnight at 37° C., 95% humidity and 7% CO2. The day after transfection the incubation volume of each approach was extended to 5 ml RPMI 1640 all medium. Supernatant was harvested after 3 days of incubation.

### 10. Flow Cytometric Binding Analysis of the MCSP and CD3 Cross-Species Specific Bispecific Antibodies

[0685] In order to test the functionality of the cross-species specific bispecific antibody constructs regarding the capability to bind to human and macaque MCSP D3 and CD3, respectively, a FACS analysis was performed. For this purpose CHO cells transfected with human MCSP D3 (as described in Example 7) and the human CD3 positive T cell leukemia cell line HPB-ALL (DSMZ, Braunschweig, ACC483) were used to test the binding to human antigens. The binding reactivity to macaque antigens was tested by using the generated macaque MCSP D3 transfectant (described in Example 8) and a macaque T cell line 4119LnPx (kindly provided by Prof. Fickenscher, Hygiene Institute, Virology, Erlangen-Nuernberg; published in Knappe A, et al., and Fickenscher H., Blood 2000, 95, 3256-61). 200.000 cells of the respective cell lines were incubated for 30 min on ice with 50 μl of the purified protein of the cross-species specific bispecific antibody constructs (2 μg/ml) or cell culture supernatant of transfected cells expressing the cross-species specific bispecific antibody constructs. The cells were washed twice in PBS with 2% FCS and binding of the construct was detected with a murine anti-His antibody (Penta His antibody; Qiagen; diluted 1:20 in 50 μl PBS with 2% FCS). After washing, bound anti-His antibodies were detected with an Fc gamma-specific antibody (Dianova) conjugated to phycoerythrin, diluted 1:100 in PBS with 2% FCS. Supernatant of untransfected CHO cells was used as negative control for binding to the T cell lines. A single chain construct with irrelevant target specificity was used as negative control for binding to the MCSP-D3 transfected CHO cells.

[0686] Flow cytometry was performed on a FACS-Calibur apparatus; the CellQuest software was used to acquire and analyze the data (Becton Dickinson biosciences, Heidelberg). FACS staining and measuring of the fluorescence intensity were performed as described in Current Protocols in Immunology (Coligan, Kruisbeek, Margulies, Shevach and Strober, Wiley-Interscience, 2002).

[0687] The bispecific binding of the single chain molecules listed above, which are cross-species specific for MCSP D3 and cross-species specific for human and macaque CD3 was clearly detectable as shown in FIGS. 10, 11, 12 and 39. In the FACS analysis all constructs showed binding to CD3 and MCSP D3 as compared to the respective negative controls. Cross-species specificity of the bispecific antibodies to human and macaque CD3 and MCSP D3 antigens was demonstrated.

### 11. Bioactivity of MCSP and CD3 Cross-Species Specific Bispecific Single Chain Antibodies

[0688] Bioactivity of the generated bispecific single chain antibodies was analyzed by chromium 51 (⁵¹Cr) release in vitro cytotoxicity assays using the MCSP D3 positive cell lines described in Examples 7 and 8. As effector cells stimulated human CD4/CD56 depleted PBMC, stimulated human PBMC or the macaque T cell line 4119LnPx are used as specified in the respective figures. Generation of the stimulated CD4/CD56 depleted PBMC was performed as follows:

[0689] Coating of a Petri dish (145 mm diameter, Greiner bio-one GmbH, Kremsmünster) was carried out with a commercially available anti-CD3 specific antibody (e.g. OKT3, Othoclone) in a final concentration of 1 μg/ml for 1 hour at 37° C. Unbound protein was removed by one washing step with PBS. The fresh PBMC were isolated from peripheral blood (30-50 ml human blood) by Ficoll gradient centrifugation according to standard protocols. 3-5×10⁷ PBMC were added to the precoated petri dish in 120 ml of RPMI 1640 with stabilized glutamine/10% FCS/IL-2 20 U/ml (Proleukin, Chiron) and stimulated for 2 days. On the third day the cells were collected and washed once with RPMI 1640. IL-2 was added to a final concentration of 20 U/ml and the cells were cultivated again for one day in the same cell culture medium as above. By depletion of CD4+ T cells and CD56+ NK cells according to standard protocols CD8+ cytotoxic T lymphocytes (CTLs) were enriched.

[0690] Target cells were washed twice with PBS and labelled with 11.1 MBq ⁵¹Cr in a final volume of 100 μl RPMI with 50% FCS for 45 minutes at 37° C. Subsequently the labelled target cells were washed 3 times with 5 ml RPMI and then used in the cytotoxicity assay. The assay was performed in a 96 well plate in a total volume of 250 μl supplemented RPMI (as above) with an E:T ratio 10:1. 1 μg/ml of the cross-species specific bispecific single chain antibody molecules and 20 threefold dilutions thereof were applied. If using supernatant containing the cross-species specific bispecific single chain antibody molecules, 21 two- and 20 threefold dilutions thereof were applied for the macaque and the human cytotoxicity assay, respectively. The assay time was 18 hours and cytotoxicity was measured as relative values of released chromium in the supernatant related to the difference of maximum lysis (addition of Triton-X) and spontaneous lysis (without effector cells). All measurements were done in quadruplicates. Measurement of chromium activity in the supernatants was performed with a Wizard 3″ gamma counter (Perkin Elmer Life Sciences GmbH, Köln, Germany). Analysis of the experimental data was performed with Prism 4 for Windows (version 4.02, GraphPad Software Inc., San Diego, Calif., USA). Sigmoidal dose response curves typically have R² values >0.90 as determined by the software. EC₅₀ values calculated by the analysis program were used for comparison of bioactivity.

[0691] As shown in FIGS. 13 to 17 and 40, all of the generated cross-species specific bispecific single chain antibody constructs demonstrate cytotoxic activity against human MCSP D3 positive target cells elicited by stimulated human CD4/CD56 depleted PBMC or stimulated PBMC and against macaque MCSP D3 positive target cells elicited by the macaque T cell line 4119LnPx.

### 12. Plasma Stability of MCSP and CD3 Cross-Species Specific Bispecific Single Chain Antibodies

[0692] Stability of the generated bispecific single chain antibodies in human plasma was analyzed by incubation of the bispecific single chain antibodies in 50% human Plasma at 37° C. and 4° C. for 24 hours and subsequent testing of bioactivity. Bioactivity was studied in a chromium 51 (⁵¹Cr) release in vitro cytotoxicity assay using a MCSP positive CHO cell line (expressing MCSP as cloned according to example 14 or 15) as target and stimulated human CD8 positive T cells as effector cells.

[0693] EC₅₀ values calculated by the analysis program as described above were used for comparison of bioactivity of bispecific single chain antibodies incubated with 50% human plasma for 24 hours at 37° C. and 4° C. respectively with bispecific single chain antibodies without addition of plasma or mixed with the same amount of plasma immediately prior to the assay.

[0694] As shown in FIG. 18 and Table 2 the bioactivity of the G4 H-L×I2C H-L, G4 H-L×H2C H-L and G4 H-L×F12Q H-L bispecific antibodies was not significantly reduced as compared with the controls without the addition of plasma or with addition of plasma immediately before testing of bioactivity.

TABLE 2
bioactivity of the bispecific antibodies
without or with the addition of Plasma

| | Without | With | Plasma | Plasma |
|---|---|---|---|---|
| Construct | plasma | plasma | 37° C. | 4° C. |
| G4 H-L x | 300 | 796 | 902 | 867 |
| I2C H-L | | | | |
| G4 H-L x | 496 | 575 | 2363 | 1449 |
| H2C H-L | | | | |
| G4 H-L x | 493 | 358 | 1521 | 1040 |
| F12Q H-L | | | | |

### 13. Redistribution of Circulating T Cells in the Absence of Circulating Target Cells by First Exposure to CD3 Binding Molecules Directed at Conventional i.e. Context Dependent CD3 Epitopes is a Major Risk Factor for Adverse Events Related to the Initiation of Treatment

[0695] T Cell Redistribution in Patients with B-Cell Non-Hodgkin-Lymphoma (B-NHL) Following Initiation of Treatment with the Conventional CD3 Binding Molecule

[0696] A conventional CD19×CD3 binding molecules is a CD3 binding molecule of the bispecific tandem scFv format (Loffler (2000, Blood, Volume 95, Number 6) or WO 99/54440). It consists of two different binding portions directed at (i) CD19 on the surface of normal and malignant human B cells and (ii) CD3 on human T cells. By crosslinking CD3 on T cells with CD19 on B cells, this construct triggers the redirected lysis of normal and malignant B cells by the cytotoxic activity of T cells.

[0697] The CD3 epitope recognized by such a conventional CD3 binding molecule is localized on the CD3 epsilon chain, where it only takes the correct conformation if it is embedded within the rest of the epsilon chain and held in the right position by heterodimerization of the epsilon chain with either the CD3 gamma or delta chain. Interaction of this highly context dependent epitope with a conventional CD3 binding molecule (see e.g. Loffler (2000, Blood, Volume 95, Number 6) or WO 99/54440)—even when it occurs in a purely monovalent fashion and without any crosslinking—can induce an allosteric change in the conformation of CD3 leading to the exposure of an otherwise hidden proline-rich region within the cytoplasmic domain of CD3 epsilon. Once exposed, the proline-rich region can recruit the signal transduction molecule Nck2, which is capable of triggering further intracellular signals. Although this is not sufficient for full T cell activation, which definitely requires crosslinking of several CD3 molecules on the T cell surface, e.g. by crosslinking of several anti-CD3 molecules bound to several CD3 molecules on a T cell by several CD19 molecules on the surface of a B cell, pure monovalent interaction of conventional CD3 binding molecules to their context dependent epitope on CD3 epsilon is still not inert for T cells in terms of signalling. Without being bound by theory, monovalent conventional CD3 binding molecules (known in the art) may induce some T cell reactions when infused into humans even in those cases where no circulating target cells are available for CD3 crosslinking. An important T cell reaction to the intravenous infusion of monovalent conventional CD19×CD3 binding molecule into B-NHL patients who have essentially no circulating CD19-positive B cells is the redistribution of T cells after start of treatment. It has been found in a phase I clinical trial that this T cell reaction occurs during the starting phase of intravenous CD19×CD3 binding molecule infusion in all individuals without circulating CD19-positive target B cells essentially independent of the CD19×CD3 binding molecule dose (FIG. 19). However, sudden increases in CD19×CD3 binding molecule exposure have been found to trigger virtually the same redistributional T cell reaction in these patients as the initial exposure of T cells to CD19×CD3 binding molecule at treatment start (FIG. 20 A) and even gradual increases in CD19×CD3 binding molecule exposure still can have redistributional effects on circulating T cells (FIG. 21). Moreover, it has been found that this essentially dose-independent redistributional T cell reaction in the absence of circulating target cells as triggered by conventional CD3 binding molecules like the CD19×CD3 binding molecule (e.g. disclosed in WO 99/54440) in 100% of all treated individuals is a major risk factor for adverse events related to the initiation of treatment.

[0698] According to the study protocol, patients with relapsed histologically confirmed indolent B-cell Non-Hodgkin-Lymphoma (B-NHL) including mantle cell lymphoma were recruited in an open-label, multi-center phase I interpatient dose-escalation trial. The study protocol was approved by the independent ethics committees of all participating centers and sent for notification to the responsible regulatory authority. Measurable disease (at least one lesion≧1.5 cm) as documented by CT scan was required for inclusion into the study. Patients received conventional CD19×CD3 binding molecule by continuous intravenous infusion with a portable minipump system over four weeks at constant flow rate (i.e. dose level). Patients were hospitalized during the first two weeks of treatment before they were released from the hospital and continued treatment at home. Patients without evidence of disease progression after four weeks were offered to continue treatment for further four weeks. So far six different dose levels were tested without reaching a maximum tolerated dose (MTD): 0.5, 1.5, 5, 15, 30 and 60 μg/m²/24 h. Cohorts consisted of three patients each if no adverse events defined by the study protocol as DLT (dose limiting toxicity) were observed. In case of one DLT among the first three patients the cohort was expanded to six patients, which—in the absence of a second DLT—allowed further dose escalation. Accordingly, dose levels without DLT in cohorts with 3 patients or with one DLT in cohorts with 6 patients were regarded as safe. Study treatment was stopped in all patients who developed a DLT. At 15 and 30 μg/m²/24 h different modes of treatment initiation during the first 24 h were tested in several additional cohorts: (i) Stepwise increase after 5 μg/m²/24 h for the first 24 h to 15 μg/m²/24 h maintenance dose (patient cohort 15-step), (ii) even continuous increase of flow-rate from almost zero to 15 or 30 μg/m²/24 h (patient cohorts 15-ramp and 30-ramp) and (iii) start with the maintenance dose from the very beginning (patient cohorts 15-flat, 30-flat and 60-flat). Patient cohorts at dose levels 0.5, 1.5 and 5 μg/m²/24 h were all started with the maintenance dose from the very beginning (i.e. flat initiation).

[0699] Time courses of absolute B- and T-cell counts in peripheral blood were determined by four color FACS analysis as follows:

### Collection of Blood Samples and Routine Analysis

[0700] In patient cohorts 15-ramp, 15-flat, 30-ramp, 30-flat and 60-flat blood samples (6 ml) were obtained before and 0.75, 2, 6, 12, 24, 30, 48 hours after start of CD19×CD3 binding molecule (as disclosed in WO 99/54440) infusion as well as on treatment days 8, 15, 17, 22, 24, 29, 36, 43, 50, 57 and 4 weeks after end of conventional CD19×CD3 binding molecule infusion using EDTA-containing Vacutainer™ tubes (Becton Dickinson) which were shipped for analysis at 4° C. In patient cohorts 15-step blood samples (6 ml) were obtained before and 6, 24, 30, 48 hours after start of CD19×CD3 binding molecule infusion as well as on treatment days 8, 15, 22, 29, 36, 43, 50, 57 and 4 weeks after end of CD19×CD3 binding molecule infusion. At dose levels 0.5, 1.5 and 5 μg/m²/24 h blood samples (6 ml) were obtained before and 6, 24, 48 hours after start of CD19×CD3 binding molecule infusion as well as on treatment days 8, 15, 22, 29, 36, 43, 50, 57 and 4 weeks after end of CD19×CD3 binding molecule infusion. In some cases slight variations of these time points occurred for operational reasons. FACS analysis of lymphocyte subpopulations was performed within 24-48 h after blood sample collection. Absolute numbers of leukocyte subpopulations in the blood samples were determined through differential blood analysis on a CoulterCounter™ (Coulter).

Isolation of PBMC from Blood Samples

[0701] PBMC (peripheral blood mononuclear cells) isolation was performed by an adapted Ficoll™ gradient separation protocol. Blood was transferred at room temperature into 10 ml Leucosep™ tubes (Greiner) pre-loaded with 3 ml Biocoll™ solution (Biochrom). Centrifugation was carried out in a swing-out rotor for 15 min at 1700×g and 22° C. without deceleration. The PBMC above the Biocoll™ layer were isolated, washed once with FACS buffer (PBS/2% FBS [Foetal Bovine Serum; Biochrom]), centrifuged and resuspended in FACS buffer. Centrifugation during all wash steps was carried out in a swing-out rotor for 4 min at 800×g and 4° C. If necessary, lysis of erythrocytes was performed by incubating the isolated PBMC in 3 ml erythrocyte lysis buffer (8.29 g NH₄Cl, 1.00 g KHCO₃, 0.037 g EDTA, ad 1.0 l H₂O_{bidest}, pH 7.5) for 5 min at room temperature followed by a washing step with FACS buffer.

Staining of PBMC with Fluorescence-Labeled Antibodies Against Cell Surface Molecules

[0702] Monoclonal antibodies were obtained from Invitrogen (¹Cat. No. MHCD1301, ²Cat. No. MHCD1401), Dako (⁵Cat. No. C7224) or Becton Dickinson (³Cat. No. 555516, ⁴Cat. No. 345766) used according to the manufacturers' recommendations. 5×10⁵-1×10⁶ cells were stained with the following antibody combination: anti-CD13¹/anti-CD14² (FITC)×anti-CD56³ (PE)×anti-CD3⁴ (PerCP)×anti-CD19⁵ (APC). Cells were pelleted in V-shaped 96 well multititer plates (Greiner) and the supernatant was removed. Cell pellets were resuspended in a total volume of 100 μl containing the specific antibodies diluted in FACS buffer. Incubation was carried out in the dark for 30 min at 4° C. Subsequently, samples were washed twice with FACS buffer and cell pellets were resuspended in FACS buffer for flowcytometric analysis.

### Flowcytometric Detection of Stained Lymphocytes by FACS

[0703] Data collection was performed with a 4 color BD FACSCalibur™ (Becton Dickinson). For each measurement 1×10⁴ cells of defined lymphocyte subpopulations were acquired. Statistical analysis was performed with the program CellQuest Pro™ (Becton Dickinson) to obtain lymphocyte subpopulation percentages and to classify cell surface molecule expression intensity. Subsequently, percentages of single lymphocyte subsets related to total lymphocytes (i.e. B plus T plus NK cells excluding any myeloid cells via CD13/14-staining) as determined by FACS were correlated with the lymphocyte count from the differential blood analysis to calculate absolute cell numbers of T cells (CD3⁺, CD56⁻, CD13/14⁻) and B cells (CD19⁺, CD13/14⁻).

[0704] T cell redistribution during the starting phase of conventional CD19×CD3 binding molecule (e.g. disclosed in WO 99/54440) treatment in all those patients who had essentially no circulating CD19-positive B cells at treatment start is shown in (FIG. 19). For comparison, a representative example of T cell redistribution during the starting phase of CD19×CD3 binding molecule treatment in a patient with a significant number of circulating CD19-positive B cells is shown in FIG. 22.

[0705] In both cases (i.e. essentially no or many circulating B cells) circulating T cell counts rapidly decrease upon treatment start. However, in the absence of circulating B cells T cells tend to return into the circulating blood very early, while the return of T cells into the circulating blood of those patients who have a significant number of circulating B cells at treatment start is usually delayed until these circulating B cells are depleted. Thus, the T cell redistribution patterns mainly differ in the kinetics of T cell reappearance in the circulating blood.

[0706] Assessment of efficacy based on CT scan was carried out by central reference radiology after 4 weeks of treatment and in patients receiving additional 4 weeks also after 8 weeks of treatment plus in all cases four weeks after end of treatment.

[0707] Disappearance and/or normalization in size of all known lesions (including an enlarged spleen) plus clearance of bone marrow from lymphoma cells in cases of bone marrow infiltration was counted as complete response (CR). Reduction by at least 50% from baseline of the sum of products of the two biggest diameters (SPD) of each predefined target lesion was defined as partial response (PR); a reduction by at least 25% was regarded a minimal response (MR). Progressive disease (PD) was defined as ≧50% increase of SPD from baseline. SPD deviations from baseline between +50% and −25% were regarded as stable disease (SD).

[0708] Patient demographics, doses received and clinical outcome in 34 patients are summarized in Table 3. Clinical anti-tumor activity of the CD19×CD3 binding molecule was clearly dose dependent: Consistent depletion of circulating CD19-positive B (lymphoma) cell from peripheral blood was observed from 5 μg/m²/24 h onwards. At 15 μg/m²/24 h and 30 μg/m²/24 h first objective clinical responses (PRs and CRs) were recorded as well as cases of partial and complete elimination of B lymphoma cells from infiltrated bone marrow. Finally, at 60 μg/m²/24 h the response rate increased to 100% (PRs and CRs) and bone marrow clearance from B lymphoma cells was complete in all evaluable cases.

[0709] The CD19×CD3 binding molecule was well tolerated by the majority of patients. Most frequent adverse events of grades 1-4 in 34 patients, regardless of causality are summarized in Table 4. CD19×CD3 binding molecule-related adverse events usually were transient and fully reversible. In particular, there were 2 patients (patients #19 and #24 in Table 3) essentially without circulating CD19-positive B cells whose treatment was stopped early because of CNS adverse events (lead symptoms: confusion and disorientation) related to repeated T cell redistribution during the starting phase of CD19×CD3 binding molecule infusion.

[0710] One of these patients (#19) was in cohort 15-step. He received 5 μg/m²/24 h CD19×CD3 binding molecule for the first 24 h followed by sudden increase to 15 μg/m²/24 h maintenance dose. The corresponding T cell redistribution pattern shows that circulating T cell counts rapidly decreased upon start of infusion at 5 μg/m²/24 h followed by early reappearance of T cells in the circulating blood essentially without circulating CD19-positive B cells. As a consequence, the peripheral T cell counts had fully recovered when the CD19×CD3 binding molecule dose was increased after 24 h from 5 to 15 μg/m²/24 h. Therefore the dose step could trigger a second episode of T cell redistribution as shown in FIG. 20 A. This repeated T cell redistribution was related with CNS side effects (lead symptoms: confusion and disorientation) in this patient, which led to the stop of infusion. The relationship between repeated T cell redistribution and such CNS adverse events was also observed in previous phase I clinical trials in B-NHL patients who received CD19×CD3 binding molecule (e.g. disclosed in WO 99/54440) as repeated bolus infusion for 2 to 4 hours each usually followed by 2 days of treatment free interval (FIG. 20 B). Every single bolus infusion triggered one episode of T cell redistribution consisting of a fast decrease in circulating T cell counts and T cell recovery prior to the next bolus infusion. In total, CNS adverse events related to repeated T cell redistribution were observed in 5 out of 21 patients. FIG. 20 B shows the representative example of one patient from the bolus infusion trials, who developed CNS symptoms after the third episode of T cell redistribution. Typically, patients with CNS adverse events in the bolus infusion trials also had low circulating B cell counts.

[0711] The second patient (#24) from the continuous infusion trial, whose treatment was stopped early because of CNS adverse events (lead symptoms: confusion and disorientation) related to repeated T cell redistribution during the starting phase of CD19×CD3 binding molecule infusion, was in cohort 15-flat. By mistake, this patient received an CD19×CD3 binding molecule infusion without additional HSA as required for stabilization of the drug. The resulting uneven drug flow triggered repeated episodes of T cell redistribution instead of only one (FIG. 23 A) with the consequence that the infusion had to be stopped because of developing CNS symptoms. Yet, when the same patient was restarted correctly with CD19×CD3 binding molecule solution containing additional HSA for drug stabilization (e.g. disclosed in WO 99/54440), no repeated T cell redistribution was observed and the patient did not again develop any CNS symptoms (FIG. 23 B). Because this patient also had essentially no circulating B cells, the circulating T cells could react with fast redistribution kinetics even to subtle changes in drug exposure as observed. The CNS adverse events related to T cell redistribution in patients who have essentially no circulating target cells can be explained by a transient increase of T cell adhesiveness to the endothelial cells followed by massive simultaneous adhesion of circulating T cells to the blood vessel walls with a consecutive drop of T cell numbers in the circulating blood as observed. The massive simultaneous attachment of T cells to the blood vessel walls can cause an increase in endothelial permeability and endothelial cell activation. The consequences of increased endothelial permeability are fluid shifts from the intravascular compartment into interstitial tissue compartments including the CNS interstitium. Endothelial cell activation by attached T cells can have procoagulatory effects (Monaco et al. J Leukoc Biol 71 (2002) 659-668) with possible disturbances in blood flow (including cerebral blood flow) particularly with regard to capillary microcirculation. Thus, CNS adverse events related to T cell redistribution in patients essentially without circulating target cells can be the consequence of capillary leak and/or disturbances in capillary microcirculation through adherence of T cells to endothelial cells. The endothelial stress caused by one episode of T cell redistribution is tolerated by the majority of patients, while the enhanced endothelial stress caused by repeated T cell redistribution frequently causes CNS adverse events. More than one episode of T cell redistribution may be less risky only in patients who have low baseline counts of circulating T cells. However, also the limited endothelial stress caused by one episode of T cell redistribution can cause CNS adverse events in rare cases of increased susceptibility for such events as observed in 1 out of 21 patients in the bolus infusion trials with the CD19×CD3 binding molecule.

[0712] Without being bound by theory, the transient increase of T cell adhesiveness to the endothelial cells in patients who have essentially no circulating target cells can be explained as T cell reaction to the monovalent interaction of a conventional CD3 binding molecule, like the CD19×CD3 binding molecule (e.g. WO 99/54440), to its context dependent epitope on CD3 epsilon resulting in an allosteric change in the conformation of CD3 followed by the recruitment of Nck2 to the cytoplasmic domain of CD3 epsilon as described above. As Nck2 is directly linked to integrins via PINCH and ILK (FIG. 28), recruitment of Nck2 to the cytoplasmic domain of CD3 epsilon following an allosteric change in the conformation of CD3 through binding of a conventional CD3 binding molecule, like the CD19×CD3 binding molecule, to its context dependent epitope on CD3 epsilon, can increase the adhesiveness of T cells to endothelial cells by transiently switching integrins on the T cell surface into their more adhesive isoform via inside-out-signalling.

TABLE 3
Patient demographics and clinical outcome

| | | | | | | Best |
|---|---|---|---|---|---|---|
| | | | | | | Response* |
| | | | Disease | Dose | Clearance | (CR |
| | | | (Ann Arbor | Level | of | Duration |
| | | Age/ | Classi- | [mg/m²/ | Bone | in Months |
| Cohort | Patient | Sex | fication) | Day] | Marrow | or Weeks) |
| 1 | 1 | 71/m | IC, Binet C | 0.0005 | None | SD |
| | 2 | 67/f | MCL, Stage | 0.0005 | n.d. | PD |
| | | | IV/A/E | | | |
| | 3 | 67/m | CLL, Stage | 0.0005 | n.d. | MR |
| | | | IV/B/E | | | |
| 2 | 4 | 69/m | MCL, Stage | 0.0015 | n.i. | SD |
| | | | IV/B | | | |
| | 5 | 49/m | MCL, Stage | 0.0015 | n.d. | SD |
| | | | IV/A/S | | | |
| | 6 | 71/m | MCL, Stage | 0.0015 | n.i. | PD |
| | | | IV/B/E | | | |
| | 7 | 77/m | MCL, Stage | 0.0015 | n.i. | SD |
| | | | IV/B/E/S | | | |
| | 8 | 65/m | CLL, Stage | 0.0015 | n.d. | PD |
| | | | IV/B/E/S | | | |
| | 9 | 75/m | FL, Stage | 0.0015 | n.i. | SD |
| | | | II/B | | | |
| 3 | 10 | 58/m | MCL, Stage | 0.005 | n.i. | PD |
| | | | III/B/S | | | |
| | 11 | 68/f | FL, Stage | 0.005 | n.d. | SD |
| | | | IV/B | | | |
| | 12 | 65/m | MCL, Stage | 0.005 | n.i. | SD |
| | | | III/A/E | | | |
| 4^{a} | 13 | 60/m | SLL, Stage | 0.015 | Complete | PR |
| | | | IV/B/S | | | |
| | 14 | 73/m | MCL, Stage | 0.015 | n.i. | SD |
| | | | II/A/E | | | |
| | 15 | 44/m | FL, Stage | 0.015 | Partial | PR |
| | | | IV/B/E/S | | | |
| | 16 | 61/m | FL, Stage | 0.015 | Complete | CR |
| | | | IV/A/S | | | (7 mo) |
| | 17 | 67/m | MZL, Stage | 0.015 | n.i. | n.e. |
| | | | IV/B/S | | | |
| | 18 | 64/m | FL, Stage | 0.015 | n.i. | PD |
| | | | IV/A/E | | | |
| | 19 | 75/m | MCL, Stage | 0.015 | n.i. | n.e. |
| | | | III/A | | | |
| | 20 | 65/f | FL; Stage | 0.015 | n.i. | SD |
| | | | III/A | | | |
| | 21 | 60/m | MCL, Stage | 0.015 | None | SD |
| | | | IV/A/E | | | |
| | 22 | 67/f | FL, Stage | 0.015 | Complete | MR |
| | | | IV/B | | | |
| | 23 | 67/m | DLBCL, | 0.015 | n.i. | n.e. |
| | | | Stage III/B | | | |
| | 24 | 65/f | FL, Stage | 0.015 | n.d. | SD |
| | | | III/A | | | |
| | 25 | 74/f | WD, Stage | 0.015 | Partial | SD |
| | | | IV/B | | | |
| 5 | 26 | 67/m | MCL, Stage | 0.03 | Complete | SD |
| | | | IV/A | | | |
| | 27 | 48/m | FL, Stage | 0.03 | n.i. | PD |
| | | | III/A | | | |
| | 28 | 58/m | MCL, Stage | 0.03 | n.i. | CR |
| | | | III/A | | | (10 mo+) |
| | 29 | 45/f | MCL, Stage | 0.03 | Partial | PD |
| | | | IV/B | | | |
| | 30 | 59/m | MZL, Stage | 0.03 | n.i. | n.e. |
| | | | III/A | | | |
| | 31 | 43/m | FL, Stage | 0.03 | n.i. | MR |
| | | | III/A | | | |
| 6 | 32 | 72/m | MCL, Stage | 0.06 | Complete | PR |
| | | | IV/A | | | |
| | 33 | 55/m | MCL, Stage | 0.06 | Complete | CR |
| | | | IV/B | | | (4 mo+) |
| | 34 | 52/m | FL, Stage | 0.06 | n.i. | CR^{b} |
| | | | IV/A | | | (1 w+) |

*Centrally confirmed complete (CR) and partial (PR) responses by Cheson criteria in bold; MR, minimal response (≧25 to <50%); SD, stable disease; PD, progressive disease; duration from first documentation of response in parentheses; + denotes an ongoing response
^{^{a}}Cohort 4 was expanded to study three different schedules of treatment initiation
^{^{b}}PR after 8 weeks of treatment that turned into a CR after an additional treatment cycle of 4 weeks at the same dose following 7 weeks of treatment free interval
n.e.: not evaluable, because of treatment period <7 d
n.d.: not determined (infiltrated, but no second biopsy performed at end of treatment)
n.i.: not infiltrated at start of treatment

TABLE 4
Incidence of adverse events observed during treatment

| Adverse events regardless of relationship, | | |
|---|---|---|
| occuring in ≧3 patients | Grade 1-4 | Grade 3-4 |
| (N = 34) | N (%) | N (%) |
| Pyrexia | 22 (64.7) | 2 (5.9) |
| Leukopenia | 21 (61.8) | 11 (32.4) |
| Lymphopenia | 21 (61.8) | 21 (61.8) |
| Coagulopathy (increase in D-dimers) | 16 (47.1) | 6 (17.6) |
| Enzyme abnormality (AP, LDH, CRP) | 16 (47.1) | 10 (29.4) |
| Hepatic function abnormality (ALT, AST, GGT) | 16 (47.1) | 1 (2.9) |
| Anaemia | 13 (38.2) | 5 (14.7) |
| Chills | 13 (38.2) | 0 (0.0) |
| Headache | 12 (35.3) | 1 (2.9) |
| Hypokalaemia | 12 (35.3) | 2 (5.9) |
| Thrombocytopenia | 12 (35.3) | 6 (17.6) |
| Weight increased | 12 (35.3) | 0 (0.0) |
| Hyperglycaemia | 11 (32.4) | 2 (5.9) |
| Neutropenia | 11 (32.4) | 8 (23.5) |
| Haematuria | 10 (29.4) | 0 (0.0) |
| Oedema peripheral | 10 (29.4) | 2 (5.9) |
| Anorexia | 9 (26.5) | 1 (2.9) |
| Diarrhoea | 9 (26.5) | 0 (0.0) |
| Weight decreased | 9 (26.5) | 0 (0.0) |
| Fatigue | 8 (23.5) | 1 (2.9) |
| Proteinuria | 8 (23.5) | 0 (0.0) |
| Hypocalcaemia | 7 (20.6) | 2 (5.9) |
| Pancreatic enzyme abnormality | 7 (20.6) | 0 (0.0) |
| Cough | 6 (17.6) | 0 (0.0) |
| Dyspnoea | 6 (17.6) | 0 (0.0) |
| Back pain | 5 (14.7) | 0 (0.0) |
| Catheter site pain | 5 (14.7) | 0 (0.0) |
| Hyperbilirubinaemia | 5 (14.7) | 2 (5.9) |
| Hypoalbuminaemia | 5 (14.7) | 0 (0.0) |
| Hypogammaglobulinaemia | 5 (14.7) | 1 (2.9) |
| Hypoproteinaemia | 5 (14.7) | 0 (0.0) |
| Pleural effusion | 5 (14.7) | 1 (2.9) |
| Vomiting | 5 (14.7) | 0 (0.0) |
| Asthenia | 4 (11.8) | 1 (2.9) |
| Confusional state | 4 (11.8) | 0 (0.0) |
| Constipation | 4 (11.8) | 0 (0.0) |
| Dizziness | 4 (11.8) | 0 (0.0) |
| Hypertension | 4 (11.8) | 0 (0.0) |
| Hyponatraemia | 4 (11.8) | 2 (5.9) |
| Mucosal dryness | 4 (11.8) | 0 (0.0) |
| Muscle spasms | 4 (11.8) | 0 (0.0) |
| Nausea | 4 (11.8) | 0 (0.0) |
| Night sweats | 4 (11.8) | 0 (0.0) |
| Abdominal pain | 3 (8.8) | 1 (2.9) |
| Ascites | 3 (8.8) | 0 (0.0) |
| Hypercoagulation | 3 (8.8) | 0 (0.0) |
| Hyperhidrosis | 3 (8.8) | 0 (0.0) |
| Hypoglobulinaemia | 3 (8.8) | 0 (0.0) |
| Insomnia | 3 (8.8) | 0 (0.0) |
| Liver disorder | 3 (8.8) | 1 (2.9) |
| Nasopharyngitis | 3 (8.8) | 0 (0.0) |
| Pruritus | 3 (8.8) | 0 (0.0) |

[0713] Abbreviations used are: AE, adverse event; AP, alkaline phosphatase; LDH, lactate dehydrogenase; CRP, C-reactive protein; ALT, alanine transaminase; AST, aspartate transaminase; GGT, gamma-glutamyl transferase; AE data from the additional treatment cycle of patient 34 not yet included.

[0714] As explained above, conventional CD3 binding molecules (e.g. disclosed in WO 99/54440) capable of binding to a context-dependent epitope, though functional, lead to the undesired effect of T cell redistribution in patients causing CNS adverse events. In contrast, binding molecules of the present invention, by binding to the context-independent N-terminal 1-27 amino acids of the CD3 epsilon chain, do not lead to such T cell redistribution effects. As a consequence, the CD3 binding molecules of the invention are associated with a better safety profile compared to conventional CD3 binding molecules.

### 14. Bispecific CD3 Binding Molecules of the Invention Inducing T Cell Mediated Target Cell Lysis by Recognizing a Surface Target Antigen Deplete Target Antigen Positive Cells In Vivo

[0715] A Bispecific CD3 Binding Molecule of the Invention Recognizing CD33 as Target Antigen Depletes CD33-Positive Circulating Monocytes from the Peripheral Blood of Cynomolgus Monkeys

[0716] CD33-AF5 VH-VL×I2C VH-VL (amino acid sequence: SEQ ID NO. 267) was produced by expression in CHO cells using the coding nucleotide sequence SEQ ID NO. 268. The coding sequences of (i) an N-terminal immunoglobulin heavy chain leader comprising a start codon embedded within a Kozak consensus sequence and (ii) a C-terminal His₆-tag followed by a stop codon were both attached in frame to the nucleotide sequence SEQ ID NO 268 prior to insertion of the resulting DNA-fragment as obtained by gene synthesis into the multiple cloning site of the expression vector pEF-DHFR (Raum et al. Cancer Immunol Immunother 50 (2001) 141-150). Stable transfection of DHFR-deficient CHO cells, selection for DHFR-positive transfectants secreting the CD3 binding molecule CD33-AF5 VH-VL×I2C VH-VL into the culture supernatant and gene amplification with methotrexat for increasing expression levels were carried out as described (Mack et al. Proc. Natl. Acad. Sci. USA 92 (1995) 7021-7025). The analytical SEC-profile of CD33-AF5 VH-VL×I2C VH-VL for use in cynomolgus monkeys revealed that the test material almost exclusively consisted of monomer. The potency of the test material was measured in a cytotoxicity assay as described in example 16.5 using CHO cells transfected with cynomolgus CD33 as target cells and the macaque T cell line 4119LnPx as source of effector cells (FIG. 25). The concentration of CD33-AF5 VH-VL×I2C VH-VL required for half-maximal target cell lysis by the effector T cells (EC50) was determined to be 2.7 ng/ml. Young (approx. 3 years old) adult cynomolgus monkeys (Macaca fascicularis) were treated by continuous intravenous infusion of CD3 binding molecule CD33-AF5 VH-VL×I2C VH-VL at different flow-rates (i.e. dose levels) to study depletion of circulating CD33-positive monocytes from the peripheral blood. This situation is equivalent to the treatment with the conventional CD3 binding molecule CD19×CD3 (specific for CD19 on B cells and CD3 on T cells) of those B-NHL patients, who have circulating CD19-positive target B cells (see e.g. WO99/54440). Depletion of circulating CD19-positive target B cells from the peripheral blood had turned out as a valid surrogate for the general clinical efficacy of the conventional CD3 binding molecule (CD19×CD3 as provided in WO99/54440) in patients with CD19-positive B-cell malignomas like B-NHL. Likewise, depletion of circulating CD33-positive monocytes from the peripheral blood is regarded as a valid surrogate of the general clinical efficacy of CD33-directed bispecific CD3 binding molecules of the invention like CD33-AF5 VH-VL×I2C VH-VL in patients with CD33-positive myeloid malignomas like AML (acute myeloid leukemia).

[0717] Continuous infusion was carried out according to the Swivel method as follows: The monkeys are catheterized via the vena femoralis into the vena cava caudalis using a vein catheter. The catheter is tunneled subcutaneously to the dorsal shoulder region and exteriorized at the caudal scapula. Then a tube is passed through a jacket and a protection spring. The jacket is fastened around the animal and the catheter, via the tube, is connected to an infusion pump.

[0718] Administration solution (1.25 M lysine, 0.1% tween 80, pH 7) without test material was infused continuously at 48 ml/24 h for 7 days prior to treatment start to allow acclimatization of the animals to the infusion conditions. Treatment was started by adding CD33-AF5 VH-VL×I2C VH-VL test material to the administration solution at the amount required for each individual dose level to be tested (i.e. flow rate of CD33-AF5 VH-VL×I2C VH-VL). The infusion reservoir was changed every day throughout the whole acclimatization and treatment phase. Planned treatment duration was 7 days except for the 120 μg/m²/24 h dose level, where animals received 14 days of treatment.

[0719] Time courses of absolute counts in circulating T cells and CD33-positive monocytes were determined by 4- or 3-colour FACS analysis, respectively:

### Collection of Blood Samples and Routine Analysis

[0720] Blood samples (1 ml) were obtained before and 0.75, 2, 6, 12, 24, 30, 48, 72 hours after start of continuous infusion with MCSP-G4 VH-VL×I2C VH-VL as well as after 7 and 14 days (and after 9 days at the 120 μg/m²/24 h dose level) of treatment using EDTA-containing Vacutainer™ tubes (Becton Dickinson) which were shipped for analysis at 4° C. In some cases slight variations of these time points occurred for operational reasons. FACS analysis of lymphocyte subpopulations was performed within 24-48 h after blood sample collection. Absolute numbers of leukocyte subpopulations in the blood samples were determined through differential blood analysis in a routine veterinary lab.

Isolation of PBMC from Blood Samples

[0721] PBMC (peripheral blood mononuclear cells) were isolated in analogy to the protocol described in example 13, above, with adaptations of the used volumes.

Staining of PBMC with Fluorescence-Labeled Antibodies Against Cell Surface Molecules

[0722] Monoclonal antibodies reactive with cynomolgus antigens were obtained from Becton Dickinson (¹Cat. No. 345784, ²Cat. No. 556647, ³Cat. No. 552851, ⁶Cat. No. 557710), Beckman Coulter (⁴Cat. No. IM2470) and Miltenyi (⁵Cat. No. 130-091-732) and used according to the manufacturers' recommendations. 5×10⁵-1×10⁶ cells were stained with the following antibody combinations: anti-CD14¹ (FITC)×anti-CD56² (PE)×anti-CD3³ (PerCP)×anti-CD19⁴ (APC) and anti-CD14¹ (FITC)×anti-CD33⁵ (PE)×anti-CD16⁶ (Alexa Fluor 647TH). Additional steps were performed as described in example 13, above.

### Flowcytometric Detection of Stained Lymphocytes by FACS

[0723] Data collection was performed with a 4 color BD FACSCalibur™ (Becton Dickinson). For each measurement 1×10⁴ cells of defined lymphocyte subpopulations were acquired. Statistical analysis was performed with the program CellQuest Pro™ (Becton Dickinson) to obtain lymphocyte subpopulation percentages and to classify cell surface molecule expression intensity. Subsequently, percentages of single lymphocyte subsets related to total lymphocytes (i.e. B plus T plus NK cells excluding myeloid cells via CD14-staining) as determined by FACS were correlated with the lymphocyte count from the differential blood analysis to calculate absolute cell numbers of T cells (CD3⁺, CD56⁻, CD14⁻). Absolute numbers of CD33-positive monocytes were calculated by multiplying the monocyte counts from the differential blood analysis with the corresponding ratios of CD33-positive monocytes (CD33⁺, CD14⁺) to all monocytes (CD14⁺) as determined by FACS.

[0724] The percentage compared to baseline (i.e. 100%) of absolute circulating CD33-positive monocyte counts at the end of treatment with CD33-AF5 VH-VL×I2C VH-VL in 4 cohorts of 2 cynomolgus monkeys with inter-cohort dose escalation from 30 over 60 and 240 to 1000 μg/m²/24 h are shown in FIG. 26 A.

[0725] As shown in FIG. 26 A, continuous intravenous infusion of CD33-AF5 VH-VL×120 VH-VL induces depletion of circulating CD33-positive monocytes in a dose-dependent manner. While there was still no detectable depletion of circulating CD33-positive monocytes at 30 μg/m²/24 h, a first trend towards a reduction of CD33-positive monocyte counts became visible at 60 μg/m²/24 h after 7 days of treatment. At 240 μg/m²/24 h circulating CD33-positive monocytes were almost completely depleted from the peripheral blood after 3 days of treatment. This was reached even faster at 1000 μg/m²/24 h, where depletion of the circulating CD33-positive monocytes from the peripheral blood was completed already after 1 day of treatment. This finding was confirmed by the results shown in FIG. 26 B demonstrating depletion of circulating CD33-positive monocytes by two thirds and 50% compared to the respective baseline in two cynomolgus monkeys treated by continuous infusion with CD33-AF5 VH-VL×I2C VH-VL at 120 μg/m²/24 h for 14 days.

[0726] This outcome is a clear signal clinical efficacy of the CD3 binding molecules of the invention in general and of bispecific CD33-directed CD3 binding molecules of the invention for the treatment of CD33-positive malignomas like AML in particularly. Moreover, the T cell redistribution during the starting phase of treatment with CD33-AF5 VH-VL×I2C VH-VL in the presence of circulating target cells (i.e. CD33-positive monocytes) seems to be less pronounced than T cell redistribution during the starting phase of treatment with conventional CD19×CD3 constructs, as described in WO99/54440 in B-NHL patients with a significant number of circulating target cells (i.e. CD19-positive B cells) as shown in FIG. 22. While T cells disappear completely from the circulation upon start of CD19×CD3 infusion and do not reappear until the circulating CD19-positive target B cells are depleted from the peripheral blood (FIG. 22), initial disappearance of circulating T cells is incomplete upon infusion start with CD33-AF5 VH-VL×I2C VH-VL and T cell counts recover still during the presence of circulating CD33-positive target cells (FIG. 26 B). This confirms that CD3 binding molecules of the invention (directed against and generated against an epitope of human and non-chimpanzee primates CD3c (epsilon) chain and being a part or fragment or the full length of the amino acid sequence as provided in SEQ ID Nos. 2, 4, 6, or 8) by recognizing a context-independent CD3 epitope show a more favorable T cell redistribution profile than conventional CD3 binding molecules recognizing a context-dependent CD3 epitope, like the binding molecules provided in WO99/54440.

### 15. CD3 Binding Molecules of the Invention Directed at Essentially Context Independent CD3 Epitopes by Inducing Less Redistribution of Circulating T Cells in the Absence of Circulating Target Cells Reduce the Risk of Adverse Events Related to the Initiation of Treatment

[0727] Reduced T Cell Redistribution in Cynomolgus Monkeys Following Initiation of Treatment with a Representative Cross-Species Specific CD3 Binding Molecule of the Invention

[0728] MCSP-G4 VH-VL×I2C VH-VL (amino acid sequence: SEQ ID NO. 193) was produced by expression in CHO cells using the coding nucleotide sequence SEQ ID NO. 194. The coding sequences of (i) an N-terminal immunoglobulin heavy chain leader comprising a start codon embedded within a Kozak consensus sequence and (ii) a C-terminal His6-tag followed by a stop codon were both attached in frame to the nucleotide sequence SEQ ID NO. 194 prior to insertion of the resulting DNA-fragment as obtained by gene synthesis into the multiple cloning site of the expression vector pEF-DHFR (Raum et al. Cancer Immunol Immunother 50 (2001) 141-150). Stable transfection of DHFR-deficient CHO cells, selection for DHFR-positive transfectants secreting the CD3 binding molecule MCSP-G4 VH-VL×I2C VH-VL into the culture supernatant and gene amplification with methotrexat for increasing expression levels were carried out as described (Mack et al. Proc. Natl. Acad. Sci. USA 92 (1995) 7021-7025). Test material for treatment of cynomolgus monkeys was produced in a 200-liter fermenter. Protein purification from the harvest was based on IMAC affinity chromatography targeting the C-terminal His6-tag of MCSP-G4 VH-VL×I2C VH-VL followed by preparative size exclusion chromatography (SEC). The total yield of final endotoxin-free test material was 40 mg. The test material consisted of 70 monomer, 30% dimer and a small contamination of higher multimer. The potency of the test material was measured in a cytotoxicity assay as described in example 11 using CHO cells transfected with cynomolgus MCSP as target cells and the macaque T cell line 4119LnPx as source of effector cells (FIG. 27). The concentration of MCSP-G4 VH-VL×I2C VH-VL required for half-maximal target cell lysis by the effector T cells (EC50) was determined to be 1.9 ng/ml.

[0729] Young (approx. 3 years old) adult cynomolgus monkeys (Macaca fascicularis) were treated by continuous intravenous infusion of CD3 binding molecule MCSP-G4 VH-VL×I2C VH-VL at different flow-rates (i.e. dose levels) to study redistribution of circulating T cells following initiation of treatment in the absence of circulating target cells. Although the CD3 binding molecule MCSP-G4 VH-VL×I2C VH-VL can recognize both cynomolgus MCSP and cynomolgus CD3, there are no circulating blood cells expressing MCSP. Therefore, the only interaction possible in the circulating blood is binding of the CD3-specific arm of MCSP-G4 VH-VL×I2C VH-VL to CD3 on T cells. This situation is equivalent to the treatment with the conventional CD3 binding molecule (CD19×CD3 binding molecule specific for CD19 on B cells and CD3 on T cells) of those B-NHL patients, who have no circulating CD19-positive target B cells as described in example 13.

[0730] Continuous infusion was carried out according to the Swivel method as follows: The monkeys are catheterized via the vena femoralis into the vena cava caudalis using a vein catheter. The catheter is tunneled subcutaneously to the dorsal shoulder region and exteriorized at the caudal scapula. Then a tube is passed through a jacket and a protection spring. The jacket is fastened around the animal and the catheter, via the tube, is connected to an infusion pump.

[0731] Administration solution (1.25 M lysine, 0.1% tween 80, pH 7) without test material was infused continuously at 48 ml/24 h for 7 days prior to treatment start to allow acclimatization of the animals to the infusion conditions. Treatment was started by adding MCSP-G4 VH-VL×I2C VH-VL test material to the administration solution at the amount required for each individual dose level to be tested (i.e. flow rate of MCSP-G4 VH-VL×I2C VH-VL). The infusion reservoir was changed every day throughout the whole acclimatization and treatment phase. Treatment duration was 7 days.

[0732] Time courses of absolute T-cell counts in peripheral blood were determined by four color FACS analysis as follows:

### Collection of Blood Samples and Routine Analysis

[0733] Blood samples (1 ml) were obtained before and 0.75, 2, 6, 12, 24, 30, 48, 72 hours after start of continuous infusion with MCSP-G4 VH-VL×I2C VH-VL as well as after 7 days of treatment using EDTA-containing Vacutainer™ tubes (Becton Dickinson) which were shipped for analysis at 4° C. In some cases slight variations of these time points occurred for operational reasons. FACS analysis of lymphocyte subpopulations was performed within 24-48 h after blood sample collection. Absolute numbers of leukocyte subpopulations in the blood samples were determined through differential blood analysis in a routine veterinary lab.

Isolation of PBMC from Blood Samples

[0734] PBMC were isolated in analogy to the protocol described in example 13, above, with adaptations of the used volumes.

Staining of PBMC with Fluorescence-Labeled Antibodies Against Cell Surface Molecules

[0735] Monoclonal antibodies reactive with cynomolgus antigens were obtained from Becton Dickinson (¹Cat. No. 345784, ²Cat. No. 556647, ³Cat. No. 552851) and Beckman Coulter (⁴Cat. No. IM2470) used according to the manufacturers' recommendations. 5×10⁵-1×10⁶ cells were stained with the following antibody combination: anti-CD14¹ (FITC)×anti-CD56² (PE)×anti-CD3³ (PerCP)×anti-CD19⁴ (APC). Additional steps were performed as described in example 13, above.

### Flowcytometric Detection of Stained Lymphocytes by Facs

[0736] Data collection was performed with a 4 color BD FACSCalibur™ (Becton Dickinson). For each measurement 1×10⁴ cells of defined lymphocyte subpopulations were acquired. Statistical analysis was performed with the program CellQuest Pro™ (Becton Dickinson) to obtain lymphocyte subpopulation percentages and to classify cell surface molecule expression intensity. Subsequently, percentages of single lymphocyte subsets related to total lymphocytes (i.e. B plus T plus NK cells excluding myeloid cells via CD14-staining) as determined by FACS were correlated with the lymphocyte count from the differential blood analysis to calculate absolute cell numbers of T cells (CD3⁺, CD56⁻, CD14⁻).

[0737] T cell redistribution during the starting phase of treatment with MCSP-G4 VH-VL×120 VH-VL in cynomolgus monkeys at dose levels of 60, 240 and 1000 μg/m²/24 h is shown in FIG. 28. These animals showed no signs at all of any T cell redistribution during the starting phase of treatment, i.e. T cell counts rather increased than decreased upon treatment initiation. Given that T cell redistribution is consistently observed in 100% of all patients without circulating target cells, upon treatment initiation with the conventional CD3 binding molecule (e.g. CD19×CD3 construct as described in WO 99/54440) against a context dependent CD3 epitope, it was demonstrated that substantially less T cell redistribution in the absence of circulating target cells upon treatment initiation can be observed with a CD3 binding molecule of the invention directed and generated against an epitope of human an non-chimpanzee primate CD3 epsilon chain as defined by the amino acid sequence of anyone of SEQ ID NOs: 2, 4, 6, or 8 or a fragment thereof. This is in clear contrast to CD3-binding molecules directed against a context-dependent CD3 epitope, like the constructs described in WO 99/54440, The binding molecules against context-independent CD3 epitopes, as (inter alia) provided in any one of SEQ ID NOs: 2, 4, 6, or 8 (or fragments of these sequences) provide for this substantially less (detrimental and non-desired) T cell redistribution. Because T cell redistribution during the starting phase of treatment with CD3 binding molecules is a major risk factor for CNS adverse events, the CD3 binding molecules provided herein and capable of recognizing a context independent CD3 epitope have a substantial advantage over the CD3 binding molecules known in the art and directed against context-dependent CD3 epitopes. Indeed none of the cynomolgus monkeys treated with MCSP-G4 VH-VL×I2C VH-VL showed any signs of CNS symptoms. The context-independence of the CD3 epitope is provided in this invention and corresponds to the first 27 N-terminal amino acids of CD3 epsilon) or fragments of this 27 amino acid stretch. This context-independent epitope is taken out of its native environment within the CD3 complex and fused to heterologous amino acid sequences without loss of its structural integrity. Anti-CD3 binding molecules as provided herein and generated (and directed) against a context-independent CD3 epitope provide for a surprising clinical improvement with regard to T cell redistribution and, thus, a more favorable safety profile. Without being bound by theory, since their CD3 epitope is context-independent, forming an autonomous selfsufficient subdomain without much influence on the rest of the CD3 complex, the CD3 binding molecules provided herein induce less allosteric changes in CD3 conformation than the conventional CD3 binding molecules (like molecules provided in WO 99/54440), which recognize context-dependent CD3 epitopes like molecules provided in WO 99/54440. As a consequence (again without being bound by theory), the induction of intracellular NcK2 recruitment by the CD3 binding molecules provided herein is also reduced resulting in less isoform switch of T cell integrins and less adhesion of T cells to endothelial cells. It is preferred that preparations of CD3 binding molecules of the invention (directed against and generated against a context-independent epitope as defined herein) essentially consists of monomeric molecules. These monomeric molecules are even more efficient (than dimeric or multimeric molecules) in avoiding T cell redistribution and thus the risk of CNS adverse events during the starting phase of treatment.

### 16. Generation and Characterization of CD33 and CD3 Cross-Species Specific Bispecific Single Chain Molecules

### 16.1. Generation of CHO Cells Expressing Human CD33

[0738] The coding sequence of human CD33 as published in GenBank (Accession number NM_{—}001772) was obtained by gene synthesis according to standard protocols. The gene synthesis fragment was designed as to contain first a Kozak site for eukaryotic expression of the construct, followed by a 19 amino acid immunoglobulin leader peptide, followed in frame by the coding sequence of the mature human CD33 protein, followed in frame by the coding sequence of serine glycine dipeptide, a histidine₆-tag and a stop codon (the cDNA and amino acid sequence of the construct is listed under SEQ ID Nos 305 and 306). The gene synthesis fragment was also designed as to introduce restriction sites at the beginning and at the end of the fragment. The introduced restriction sites, EcoRI at the 5′ end and SalI at the 3′ end, were utilised in the following cloning procedures. The gene synthesis fragment was cloned via EcoRI and SalI into a plasmid designated pEF-DHFR (pEF-DHFR is described in Raum et al. Cancer Immunol Immunother 50 (2001) 141-150) following standard protocols. The aforementioned procedures were carried out according to standard protocols (Sambrook, Molecular Cloning; A Laboratory Manual, 3rd edition, Cold Spring Harbour Laboratory Press, Cold Spring Harbour, N.Y. (2001)). A clone with sequence-verified nucleotide sequence was transfected into DHFR deficient CHO cells for eukaryotic expression of the construct. Eukaryotic protein expression in DHFR deficient CHO cells was performed as described by Kaufmann R. J. (1990) Methods Enzymol. 185, 537-566. Gene amplification of the construct was induced by increasing concentrations of methothrexate (MTX) to a final concentration of up to 20 nM MTX.

### 16.2. Generation of CHO Cells Expressing the Extracellular Domain of Macaque CD33

[0739] The cDNA sequence of macaque CD33 was obtained by a set of 3 PCRs on cDNA from macaque monkey bone marrow prepared according to standard protocols. The following reaction conditions: 1 cycle at 94° C. for 3 minutes followed by 35 cycles with 94° C. for 1 minute, 53° C. for 1 minute and 72° C. for 2 minutes followed by a terminal cycle of 72° C. for 3 minutes and the following primers were used:

| 1. | forward primer: | (SEQ ID No. 369) |
|---|---|---|
| | 5′-gaggaattcaccatgccgctgctgctactgctgcccctgctgtgggcaggggccctggctatgg-3′ | |
| | reverse primer: | (SEQ ID No. 370) |
| | 5′-gatttgtaactgtatttggtacttcc-3′ | |
| 2. | forward primer: | (SEQ ID No. 371) |
| | 5′-attccgcctccttggggatcc-3′ | |
| | reverse primer: | (SEQ ID No. 372) |
| | 5′-gcataggagacattgagctggatgg-3′ | |
| 3. | forward primer: | (SEQ ID No. 373) |
| | 5′-gcaccaacctgacctgtcagg-3′ | |
| | reverse primer: | (SEQ ID No. 374) |

5′-agtgggtcgactcactgggtcctgacctctgagtattcg-3′

[0740] Those PCRs generate three overlapping fragments, which were isolated and sequenced according to standard protocols using the PCR primers, and thereby provided a portion of the cDNA sequence of macaque CD33 from the second nucleotide of codon +2 to the third nucleotide of codon +340 of the mature protein. To generate a construct for expression of macaque CD33 a cDNA fragment was obtained by gene synthesis according to standard protocols (the cDNA and amino acid sequence of the construct is listed under SEQ ID Nos 307 and 308). In this construct the coding sequence of macaque CD33 from amino acid+3 to +340 of the mature CD33 protein was fused into the coding sequence of human CD33 replacing the human coding sequence of the amino acids +3 to +340. The gene synthesis fragment was also designed as to contain a Kozak site for eukaryotic expression of the construct and restriction sites at the beginning and the end of the fragment containing the cDNA coding for essentially the whole extracellular domain of macaque CD33, the macaque CD33 transmembrane domain and a macaque-human chimeric intracellular CD33 domain. The introduced restriction sites XbaI at the 5′ end and SalI at the 3′ end, were utilised in the following cloning procedures. The gene synthesis fragment was then cloned via XbaI and SalI into a plasmid designated pEF-DHFR (pEF-DHFR is described in Raum et al. Cancer Immunol Immunother 50 (2001) 141-150). A sequence verified clone of this plasmid was used to transfect CHO/dhfr-cells as described above.

### 16.3. Generation of CD33 and CD3 Cross-Species Specific Bispecific Antibody Molecules

### Cloning of Cross-Species Specific Binding Molecules

[0741] Generally, bispecific antibody molecules, each comprising a domain with a binding specificity cross-species specific for human and non-chimpanzee primate CD3 epsilon as well as a domain with a binding specificity cross-species specific for human and non-chimpanzee primate CD33, were designed as set out in the following Table 5:

TABLE 5
Formats of anti-CD3
and anti-CD33
cross-species specific
bispecific molecules

| | Formats of |
|---|---|
| | protein |
| SEQ ID | constructs |
| (nucl/prot) | (N → C) |
| 276/275 | AH11HLxH2CHL |
| 258/257 | AH3HLxH2CHL |
| 270/269 | AC8HLxH2CHL |
| 264/263 | AF5HLxH2CHL |
| 288/287 | F2HLxH2CHL |
| 300/299 | E11HLxH2CHL |
| 282/281 | B3HLxH2CHL |
| 294/293 | B10HLxH2CHL |
| 278/277 | AH11HLxF12QHL |
| 260/259 | AH3HLxF12QHL |
| 272/271 | AC8HLxF12QHL |
| 266/265 | AF5HLxF12QHL |
| 290/289 | F2HLxF12QHL |
| 302/301 | E11HLxF12QHL |
| 284/283 | B3HLxF12QHL |
| 296/295 | B10HLxF12QHL |
| 280/279 | AH11HLxI2CHL |
| 262/261 | AH3HLxI2CHL |
| 274/273 | AC8HLxI2CHL |
| 268/267 | AF5HLxI2CHL |
| 292/291 | F2HLxI2CHL |
| 304/303 | E11HLxI2CHL |
| 286/285 | B3HLxI2CHL |
| 298/297 | B10HLxI2CHL |

[0742] The aforementioned constructs containing the variable light-chain (L) and variable heavy-chain (H) domains cross-species specific for human and macaque CD33 and the CD3 specific VH and VL combinations cross-species specific for human and macaque CD3 were obtained by gene synthesis. The gene synthesis fragments were designed and eukaryotic protein expression was performed similar as described in example 9 for the MCSP and CD3 cross-species specific single chain molecules. The same holds true for the expression and purification of the CD33 and CD3 cross-species specific single chain molecules.

[0743] In the Western Blot a single band was detected at 52 kD corresponding to the purified bispecific antibody.

### 16.4. Flow Cytometric Binding Analysis of the CD33 and CD3 Cross-Species Specific Bispecific Antibodies

[0744] In order to test the functionality of the cross-species specific bispecific antibody constructs regarding the capability to bind to human and macaque CD33 and CD3, respectively, a FACS analysis was performed similar to the analysis described for the analysis of the MCSP and CD3 cross-species specific bispecific antibodies in example 10 using CHO cells expressing the human or macaque CD33 extracellular domains (see example 16.1 and 16.2).

[0745] The specific binding of human and non-chimpanzee primate CD3 of the CD3 binding molecules of the invention was clearly detectable as shown in FIG. 29. In the FACS analysis all constructs show binding to CD3 and CD33 as compared to the respective negative controls. Cross-species specificity of the bispecific antibodies to human and macaque CD3 and CD33 antigens is demonstrated.

### 16.5. Bioactivity of CD33 and CD3 Cross-Species Specific Bispecific Antibodies

[0746] Bioactivity of the generated bispecific antibodies was analyzed by chromium 51 (⁵¹Cr) release in vitro cytotoxicity assays using the CD33 positive cell lines described in Examples 16.1 and 16.2. As effector cells stimulated human CD4/CD56 depleted PBMC or the macaque T cell line 4119LnPx were used as specified in the respective figures. The cytotoxicity assays were performed similar to the setting described for the bioactivity analysis of the MCSP and CD3 cross-species specific bispecific antibodies in example 11 using CHO cells expressing the human or macaque CD33 extracellular domains (see example 16.1 and 16.2) as target cells. As shown in FIG. 30, all of the generated cross-species specific bispecific constructs demonstrate cytotoxic activity against human CD33 positive target cells elicited by stimulated human CD4/CD56 depleted PBMC and against macaque CD33 positive target cells elicited by the macaque T cell line 4119LnPx.

### 17. Purification of Cross-Species Specific Bispecific Single Chain Molecules by an Affinity Procedure Based on the Context Independent CD3 Epsilon Epitope Corresponding to the N-Terminal Amino Acids 1-27

### 17.1 Generation of an Affinity Column Displaying the Isolated Context Independent Human CD3 Epsilon Epitope Corresponding to the N-Terminal Amino Acids 1-27

[0747] The plasmid for expression of the construct 1-27 CD3-Fc consisting of the 1-27 N-terminal amino acids of the human CD3 epsilon chain fused to the hinge and Fc gamma region of human immunoglobulin IgG1 described above (Example 3; cDNA sequence and amino acid sequence of the recombinant fusion protein are listed under SEQ ID NOs 230 and 229) was transfected into DHFR deficient CHO cells for eukaryotic expression of the construct. Eukaryotic protein expression in DHFR deficient CHO cells was performed as described by Kaufmann R. J. (1990) Methods Enzymol. 185, 537-566. Gene amplification of the construct was induced by increasing concentrations of methotrexate (MTX) to a final concentration of up to 20 nM MTX. After two passages of stationary culture the cells were grown in roller bottles with nucleoside-free HyQ PF CHO liquid soy medium (with 4.0 mM L-Glutamine with 0.1% Pluronic F-68; HyClone) for 7 days before harvest. The cells were removed by centrifugation and the supernatant containing the expressed protein was stored at −20° C. For the isolation of the fusion protein a goat anti-human fc affinity column was prepared according to standard protocols using a commercially available affinity purified goat anti-human IgG fc fragment specific antibody with minimal cross-reaction to bovine, horse, and mouse serum proteins (Jackson ImmunoResearch Europe Ltd.). Using this affinity column the fusion protein was isolated out of cell culture supernatant on an Äkta Explorer System (GE Amersham) and eluted by citric acid. The eluate was neutralized and concentrated. After dialysis against amine free coupling buffer the purified fusion protein was coupled to an N-Hydroxy-Succinimide NHS activated 1 ml HiTrap column (GE Amersham).

[0748] After coupling remaining NHS groups were blocked and the column was washed and stored at 5° C. in storage buffer containing 0.1% sodium azide.

### 17.2 Purification of Cross-Species Specific Bispecific Single Chain Molecules Using a Human CD3 Peptide Affinity Column

[0749] 200 ml cell culture supernatant of cells expressing cross-species specific bispecific single chain molecules were 0.2 μm sterile filtered and applied to the CD3 peptide affinity column using an Akta Explorer system (GE Amersham).

[0750] The column was then washed with phosphate buffered saline PBS pH 7.4 to wash out unbound sample. Elution was done with an acidic buffer pH 3.0 containing 20 mM Citric acid and 1 M sodium chloride. Eluted protein was neutralized immediately by 1 M Trishydroxymethylamine TRIS pH 8.3 contained in the collection tubes of the fraction collector.

[0751] Protein analysis was done by SDS PAGE and Western Blot.

[0752] For SDS PAGE BisTris Gels 4-12% are used (Invitrogen). The running buffer was 1×MES-SDS-Puffer (Invitrogen). As protein standard 15 μl prestained Sharp Protein Standard (Invitrogen) was applied. Electrophoresis was performed for 60 minutes at 200 volts 120 mA max. Gels were washed in demineralised water and stained with Coomassie for one hour. Gels are destained in demineralised water for 3 hours. Pictures are taken with a Syngene Gel documentation system.

[0753] For Western Blot a double of the SDS PAGE gel was generated and proteins were electroblotted onto a nitrocellulose membrane. The membrane was blocked with 2% bovine serum albumin in PBS and incubated with a biotinylated murine Penta His antibody (Qiagen). As secondary reagent a streptavidin alkaline phosphatase conjugate (DAKO) was used. Blots were developed with BCIP/NBT substrate solution (Pierce).

[0754] As demonstrated in FIGS. 31, 32 and 33 the use of a human CD3 peptide affinity column as described above allows the highly efficient purification of the bispecific single chain molecules from cell culture supernatant. The cross-species specific anti-CD3 single chain antibodies contained in the bispecific single chain molecules therefore enable via their specific binding properties an efficient generic one-step method of purification for the cross-species specific bispecific single chain molecules, without the need of any tags solely attached for purification purposes.

### 18. Generic Pharmacokinetic Assay for Cross-Species Specific Bispecific Single Chain Molecules

### 18.1 Production of 1-27 CD3-Fc for Use in the Pharmacokinetic Assay

[0755] The coding sequence of the 1-27 N-terminal amino acids of the human CD3 epsilon chain fused to the hinge and Fc gamma region of human immunoglobulin IgG1 was obtained by gene synthesis according to standard protocols (cDNA sequence and amino acid sequence of the recombinant fusion protein are listed under SEQ ID NOs 309 and 310). The gene synthesis fragment was designed as to contain first a Kozak site for eukaryotic expression of the construct, followed by a 19 amino acid immunoglobulin leader peptide, followed in frame by the coding sequence of the first 27 amino acids of the extracellular portion of the mature human CD3 epsilon chain, followed in frame by the coding sequence of the hinge region and Fc gamma portion of human IgG1 and a stop codon. The gene synthesis fragment was also designed and cloned as described in example 3.1, supra. A clone with sequence-verified nucleotide sequence was transfected into DHFR deficient CHO cells for eukaryotic expression of the construct. Eukaryotic protein expression in DHFR deficient CHO cells was performed as described in example 9, supra. For the isolation of the fusion protein a goat anti-human fc affinity column was prepared according to standard protocols using a commercially available affinity purified goat anti-human IgG fc fragment specific antibody with minimal cross-reaction to bovine, horse, and mouse serum proteins (Jackson ImmunoResearch Europe Ltd.). Using this affinity column the fusion protein was isolated out of cell culture supernatant on an Akta Explorer System (GE Amersham) and eluted by citric acid. The eluate was neutralized and concentrated.

### 18.2 Pharmacokinetic Assay for Cross-Species Specific Bispecific Single Chain Molecules

[0756] The assay is based on the ECL-ELISA technology using ruthenium labelled detection on carbon plates measured on a Sektor Imager device (MSD). In a first step, carbon plates (MSD High Bind Plate 96 well Cat: L15× B-3) were coated with 5 μl/well at 50 ng/ml of the purified 1-27 CD3-Fc described in Example 18.1. The plate was then dried overnight at 25° C. Subsequently plates were blocked with 5% BSA (Paesel&Lorei #100568) in PBS at 150 μl/well for 1 h at 25° C. in an incubator while shaking (700 rpm). In the next step plates were washed three times with 0.05% Tween in PBS. A standard curve in 50% macaque serum in PBS was generated by serial 1:4 dilution starting at 100 ng/ml of the respective cross-species specific bispecific single chain molecule to be detected in the assay. Quality control (QC) samples were prepared in 50% macaque serum in PBS ranging from 1 ng/ml to 50 ng/ml of the respective cross-species specific bispecific single chain molecule dependent on the expected sample serum concentrations. Standard, QC or unknown samples were transferred to the carbon plates at 10 μl/well and incubated for 90 min at 25° C. in the incubator while shaking (700 rpm). Subsequently plates were washed three times with 0.05% Tween in PBS. For detection 25 μl/well of penta-His-Biotin antibody (Qiagen, 200 μg/ml in 0.05% Tween in PBS) was added and incubated for 1 h at 25° C. in an incubator while shaking (700 rpm). In a second detection step 25 μl/well Streptavidin-SulfoTag solution (MSD; Cat: R32AD-1; Lot: WO010903) was added and incubated for 1 h at 25° C. in an incubator while shaking (700 rpm). Subsequently plates were washed three times with 0.05% Tween in PBS. Finally 150 μl/well MSD Reading Buffer (MSD, Cat: R9ZC-1) was added and plates were read in the Sektor Imager device.

[0757] FIGS. 34 and 35 demonstrate the feasibility of detection of cross-species specific bispecific single chain molecules in serum samples of macaque monkeys for cross-species specific bispecific single chain molecules. The cross-species specific anti-CD3 single chain antibodies contained in the bispecific single chain molecules enable therefore via their specific binding properties a highly sensitive generic assay for detection of the cross-species specific bispecific single chain molecules. The assay set out above can be used in the context of formal toxicological studies that are needed for drug development and can be easily adapted for measurement of patient samples in connection with the clinical application of cross-species specific bispecific single chain molecules.

### 19. Generation of Recombinant Transmembrane Fusion Proteins of the N-Terminal Amino Acids 1-27 of CD3 Epsilon from Different Non-Chimpanzee Primates Fused to EpCAM from Cynomolgus Monkey (1-27 CD3-EpCAM)

### 19.1 Cloning and Expression of 1-27 CD3-EpCAM

[0758] CD3 epsilon was isolated from different non-chimpanzee primates (marmoset, tamarin, squirrel monkey) and swine. The coding sequences of the 1-27 N-terminal amino acids of CD3 epsilon chain of the mature human, common marmoset (Callithrix jacchus), cottontop tamarin (Saguinus oedipus), common squirrel monkey (Saimiri sciureus) and domestic swine (Sus scrofa; used as negative control) fused to the N-terminus of Flag tagged cynomolgus EpCAM were obtained by gene synthesis according to standard protocols (cDNA sequence and amino acid sequence of the recombinant fusion proteins are listed under SEQ ID NOs 231 to 240). The gene synthesis fragments were designed as to contain first a BsrGI site to allow for fusion in correct reading frame with the coding sequence of a 19 amino acid immunoglobulin leader peptide already present in the target expression vector, which was followed in frame by the coding sequence of the N-terminal 1-27 amino acids of the extracellular portion of the mature CD3 epsilon chains, which was followed in frame by the coding sequence of a Flag tag and followed in frame by the coding sequence of the mature cynomolgus EpCAM transmembrane protein. The gene synthesis fragments were also designed to introduce a restriction site at the end of the cDNA coding for the fusion protein. The introduced restriction sites BsrGI at the 5′ end and SalI at the 3′ end, were utilized in the following cloning procedures. The gene synthesis fragments were then cloned via BsrGI and SalI into a derivative of the plasmid designated pEF-DHFR (pEF-DHFR is described in Raum et al. Cancer Immunol Immunother 50 (2001) 141-150), which already contains the coding sequence of the 19 amino acid immunoglobulin leader peptide following standard protocols. Sequence verified plasmids were used to transfect DHFR deficient CHO cells for eukaryotic expression of the construct. Eukaryotic protein expression in DHFR deficient CHO cells was performed as described by Kaufmann R. J. (1990) Methods Enzymol. 185, 537-566. Gene amplification of the construct was induced by increasing concentrations of methotrexate (MTX) to a final concentration of up to 20 nM MTX.

[0759] Transfectants were tested for cell surface expression of the recombinant transmembrane protein via an FACS assay according to standard protocols. For that purpose a number of 2.5×10⁵ cells were incubated with 50 μl of the anti-Flag M2 antibody (Sigma-Aldrich Chemie GmbH, Taufkirchen, Germany) at 5 μg/ml in PBS with 2% FCS. Bound antibody was detected with an R-Phycoerythrin-conjugated affinity purified F(ab′)2 fragment, goat anti-mouse IgG, Fc-gamma fragment specific 1:100 in PBS with 2% FCS (Jackson ImmunoResearch Europe Ltd., Newmarket, Suffolk, UK). Flow cytometry was performed on a FACS-Calibur apparatus, the CellQuest software was used to acquire and analyze the data (Becton Dickinson biosciences, Heidelberg). FACS staining and measuring of the fluorescence intensity were performed as described in Current Protocols in Immunology (Coligan, Kruisbeek, Margulies, Shevach and Strober, Wiley-Interscience, 2002). Expression of the Flag tagged recombinant transmembrane fusion proteins consisting of cynomolgus EpCAM and the 1-27 N-terminal amino acids of the human, marmoset, tamarin, squirrel monkey and swine CD3 epsilon chain respectively on transfected cells is clearly detectable (FIG. 36).

### 19.2 Cloning and Expression of the Cross-Species Specific Anti-CD3 Single Chain Antibody I2C HL in Form of an IgG1 Antibody

[0760] In order to provide improved means of detection of binding of the cross-species specific single chain anti-CD3 antibody the I2C VHVL specificity is converted into an IgG1 antibody with murine IgG1 and murine kappa constant regions. cDNA sequences coding for the heavy chain of the IgG antibody were obtained by gene synthesis according to standard protocols. The gene synthesis fragments were designed as to contain first a Kozak site to allow for eukaryotic expression of the construct, which is followed by an 19 amino acid immunoglobulin leader peptide, which is followed in frame by the coding sequence of the heavy chain variable region or light chain variable region, followed in frame by the coding sequence of the heavy chain constant region of murine IgG1 as published in GenBank (Accession number AB097849) or the coding sequence of the murine kappa light chain constant region as published in GenBank (Accession number D14630), respectively.

[0761] Restriction sites were introduced at the beginning and the end of the cDNA coding for the fusion protein. Restriction sites EcoRI at the 5′ end and SalI at the 3′ end were used for the following cloning procedures. The gene synthesis fragments were cloned via EcoRI and SalI into a plasmid designated pEF-DHFR (pEF-DHFR is described in Raum et al. Cancer Immunol Immunother 50 (2001) 141-150) for the heavy chain construct and pEFADA (pEFADA is described in Raum et al. loc cit.) for the light chain construct according to standard protocols. Sequence verified plasmids were used for co-transfection of respective light and heavy chain constructs into DHFR deficient CHO cells for eukaryotic expression of the construct. Eukaryotic protein expression in DHFR deficient CHO cells was performed as described by Kaufmann R. J. (1990) loc cit. Gene amplification of the constructs was induced by increasing concentrations of methotrexate (MTX) to a final concentration of up to 20 nM MTX and deoxycoformycin (dCF) to a final concentration of up to 300 nM dCF. After two passages of stationary culture cell culture supernatant was collected and used in the subsequent experiment.

### 19.3 Binding of the Cross-Species Specific Anti-CD3 Single Chain Antibody I2C HL in Form of an IgG1 Antibody to 1-27 CD3-EpCAM

[0762] Binding of the generated I2C IgG1 construct to the 1-27 N-terminal amino acids of the human, marmoset, tamarin and squirrel monkey CD3 epsilon chains respectively fused to cynomolgus Ep-CAM as described in Example 19.1 was tested in a FACS assay according to standard protocols. For that purpose a number of 2.5×10⁵ cells were incubated with 50 μl of cell culture supernatant containing the I2C IgG1 construct as described in Example 19.2. The binding of the antibody was detected with an R-Phycoerythrin-conjugated affinity purified F(ab′)2 fragment, goat anti-mouse IgG, Fc-gamma fragment specific, diluted 1:100 in PBS with 2% FCS (Jackson ImmunoResearch Europe Ltd., Newmarket, Suffolk, UK). Flow cytometry was performed on a FACS-Calibur apparatus, the CellQuest software was used to acquire and analyze the data (Becton Dickinson biosciences, Heidelberg). FACS staining and measuring of the fluorescence intensity were performed as described in Current Protocols in Immunology (Coligan, Kruisbeek, Margulies, Shevach and Strober, Wiley-Interscience, 2002).

[0763] As shown in FIG. 37 binding of the I2C IgG1 construct to the transfectants expressing the recombinant transmembrane fusion proteins consisting of the 1-27 N-terminal amino acids of CD3 epsilon of human, marmoset, tamarin or squirrel monkey fused to cynomolgus EpCAM as compared to the negative control consisting of the 1-27 N-terminal amino acids of CD3 epsilon of swine fused to cynomolgus EpCAM was observed. Thus multi-primate cross-species specificity of I2C was demonstrated. Signals obtained with the anti Flag M2 antibody and the I2C IgG1 construct were comparable, indicating a strong binding activity of the cross-species specific specificity 120 to the N-terminal amino acids 1-27 of CD3 epsilon.

### 20. Binding of the Cross-Species Specific Anti-CD3 Binding Molecule I2C to the Human CD3 Epsilon Chain with and without N-Terminal His6 Tag

[0764] A chimeric IgG1 antibody with the binding specificity 120 as described in Example 19.2 specific for CD3 epsilon was tested for binding to human CD3 epsilon with and without N-terminal His6 tag. Binding of the antibody to the EL4 cell lines transfected with His6-human CD3 epsilon as described in Example 6.1 and wild-type human CD3 epsilon as described in Example 5.1 respectively was tested by a FACS assay according to standard protocols. 2.5×10⁵ cells of the transfectants were incubated with 50 μl of cell culture supernatant containing the I2C IgG1 construct or 50 μl of the respective control antibodies at 5 μg/ml in PBS with 2% FCS. As negative control an appropriate isotype control and as positive control for expression of the constructs the CD3 specific antibody UCHT-1 were used respectively. Detection of the His6 tag was performed with the penta His antibody (Qiagen). The binding of the antibodies was detected with a R-Phycoerythrin-conjugated affinity purified F(ab′)2 fragment, goat anti-mouse IgG, Fc-gamma fragment specific, diluted 1:100 in PBS with 2% FCS (Jackson ImmunoResearch Europe Ltd., Newmarket, Suffolk, UK). Flow cytometry was performed on a FACS-Calibur apparatus, the CellQuest software was used to acquire and analyze the data (Becton Dickinson biosciences, Heidelberg). FACS staining and measuring of the fluorescence intensity were performed as described in Current Protocols in Immunology (Coligan, Kruisbeek, Margulies, Shevach and Strober, Wiley-Interscience, 2002).

[0765] Comparable binding of the anti-human CD3 antibody UCHT-1 to both transfectants demonstrates approximately equal levels of expression of the constructs. The binding of the penta His antibody confirmed the presence of the His6 tag on the His6-human CD3 construct but not on the wild-type construct.

[0766] Compared to the EL4 cell line transfected with wild-type human CD3 epsilon a clear loss of binding of the I2C IgG1 construct to human-CD3 epsilon with an N-terminal His 6 tag was detected. These results show that a free N-terminus of CD3 epsilon is essential for binding of the cross-species specific anti-CD3 binding specificity 120 to the human CD3 epsilon chain (FIG. 28).

### 21. Generation of CD33 and CD3 Cross-Species Specific Bispecific Single Chain Molecules

### 21.1 Generation of CD33 and CD3 Cross-Species Specific Bispecific Single Chain Molecules

[0767] Generally, bispecific single chain antibody molecules, each comprising a domain with a binding specificity cross-species specific for human and macaque CD3epsilon as well as a domain with a binding specificity cross-species specific for human and macaque CD33, were designed as set out in the following Table 6:

TABLE 6
Formats of anti-CD3
and anti-CD33 cross-species
specific bispecific single
chain antibody molecules

| | Formats of |
|---|---|
| | protein |
| SEQ ID | constructs |
| (nucl/prot) | (N → C) |
| 316/315 | I2CHLxAF5HL |
| 314/313 | F12QHLxAF5HL |
| 312/311 | H2CHLxAF5HL |

[0768] The aforementioned constructs containing the variable light-chain (L) and variable heavy-chain (H) domains cross-species specific for human and macaque CD33 and the CD3 specific VH and VL combinations cross-species specific for human and macaque CD3 were obtained by gene synthesis. The gene synthesis fragments were designed in analogy to the procedure described in example 9 for the MCSP and CD3 cross-species specific single chain molecules. A clone with sequence-verified nucleotide sequence was transfected into DHFR deficient CHO cells for eukaryotic expression of the construct. Eukaryotic protein expression in DHFR deficient CHO cells was performed as also described in example 9 for the MCSP and CD3 cross-species specific single chain molecules and used in the subsequent experiments.

### 21.2 Flow Cytometric Binding Analysis of the CD33 and CD3 Cross-Species Specific Bispecific Antibodies

[0769] In order to test the functionality of the cross-species specific bispecific antibody constructs regarding the capability to bind to human and macaque CD33 and CD3, respectively, a FACS analysis is performed similar to the analysis described for the analysis of the MCSP and CD3 cross-species specific bispecific antibodies in example 10 using CHO cells expressing the human or macyque CD33 extracellular domains (see examples 16.1 and 16.2).

[0770] The bispecific binding of the single chain molecules listed above, which were cross-species specific for CD33 and cross-species specific for human and non-chimpanzee primate CD3 was clearly detectable as shown in FIG. 41. In the FACS analysis all constructs showed binding to CD3 and CD33 as compared to the respective negative controls. Cross-species specificity of the bispecific antibodies to human and macaque CD3 and CD33 antigens was demonstrated.

### 21.3. Bioactivity of CD33 and CD3 Cross-Species Specific Bispecific Single Chain Antibodies

[0771] Bioactivity of the generated bispecific single chain antibodies was analyzed by chromium 51 (⁵¹Cr) release in vitro cytotoxicity assays using the CD33 positive cell lines described in Examples 16.1 and 16.2. As effector cells stimulated human CD4/CD56 depleted PBMC or the macaque T cell line 4119LnPx were used as specified in the respective figures. The cytotoxicity assays were performed similar to the procedure described for the bioactivity analysis of the MCSP and CD3 cross-species specific bispecific antibodies in example 11 using CHO cells expressing the human or macaque CD33 extracellular domains (see example 16.1 and 16.2) as target cells.

[0772] As shown in FIG. 42, all of the generated cross-species specific bispecific single chain antibody constructs demonstrate cytotoxic activity against human CD33 positive target cells elicited by stimulated human CD4/CD56 depleted PBMC and against macaque CD33 positive target cells elicited by the macaque T cell line 4119LnPx.

### 22. Redistribution of Circulating Chimpanzee T Cells Upon Exposure to a Conventional Bispecific CD3 Binding Molecule Directed at a Target Molecule which is Absent from Circulating Blood Cells

[0773] A single male chimpanzee was subjected to dose escalation with intravenous single-chain EpCAM/CD3-bispecific antibody construct (Schlereth (2005) Cancer Res 65: 2882). Like in the conventional single-chain CD19/CD3-bispecific antibody construct (Loffler (2000, Blood, Volume 95, Number 6) or WO 99/54440), the CD3 arm of said EpCAM/CD3-construct is also directed against a conventional context dependent epitope of human and chimpanzee CD3. At day 0, the animal received 50 ml PBS/5% HSA without test material, followed by 50 ml PBS/5% HSA plus single-chain EpCAM/CD3-bispecific antibody construct at 1.6, 2.0, 3.0 and 4.5 μg/kg on days 7, 14, 21 and 28, respectively. The infusion period was 2 hours per administration. For each weekly infusion the chimpanzee was sedated with 2-3 mg/kg Telazol intramuscularly, intubated and placed on isoflurane/O₂ anesthesia with stable mean blood pressures. A second intravenous catheter was placed in an opposite limb to collect (heparinized) whole blood samples at the time points indicated in FIG. 43 for FACS analysis of circulating blood cells. After standard erythrocyte lysis, T cells were stained with a FITC-labeled antibody reacting with chimpanzee CD2 (Becton Dickinson) and the percentage of T cells per total lymphocytes determined by flowcytometry. As shown in FIG. 43, every administration of single-chain EpCAM/CD3-bispecific antibody construct induced a rapid drop of circulating T cells as observed with single-chain CD19/CD3-bispecific antibody construct in B-NHL patients, who had essentially no circulating target B (lymphoma) cells. As there are no EpCAM-positive target cells in the circulating blood of humans and chimpanzees, the drop of circulating T cells upon exposure to the single-chain EpCAM/CD3-bispecific antibody construct can be attributed solely to a signal, which the T cells receive through pure interaction of the CD3 arm of the construct with a conventional context dependent CD3 epitope in the absence of any target cell mediated crosslinking. Like the redistribution of T cells induced through their exposure to single-chain CD19/CD3-bispecific antibody construct in B-NHL patients, who had essentially no circulating target B (lymphoma) cells, the T cell redistribution in the chimpanzee upon exposure to the single-chain EpCAM/CD3-bispecific antibody construct can be explained by a conformational change of CD3 following the binding event to a context dependent CD3 epitope further resulting in the transient increase of T cell adhesiveness to blood vessel endothelium (see Example 13). This finding confirms, that conventional CD3 binding molecules directed to context dependent CD3 epitopes—solely through this interaction—can lead to a redistribution pattern of peripheral blood T cells, which is associated with the risk of CNS adverse events in humans as describe in Example 13.

### 23. Specific Binding of scFv Clones to the N-Terminus of Human CD3 Epsilon

[0774] 23.1 Bacterial Expression of scFv Constructs in E. coli XL1 Blue

[0775] As previously mentioned, E. coli XL1 Blue transformed with pComb3H5Bhis/Flag containing a VL- and VH-segment produce soluble scFv in sufficient amounts after excision of the gene III fragment and induction with 1 mM IPTG. The scFv-chain is exported into the periplasma where it folds into a functional conformation.

[0776] The following scFv clones were chosen for this experiment:

i) ScFvs 4-10, 3-106, 3-114, 3-148, 4-48, 3-190 and 3-271 as described in WO 2004/106380.
ii) ScFvs from the human anti-CD3epsilon binding clones H2C, F12Q and 120 as described herein.

[0777] For periplasmic preparations, bacterial cells transformed with the respective scFv containing plasmids allowing for periplasmic expression were grown in SB-medium supplemented with 20 mM MgCl₂ and carbenicillin 50 μg/ml and redissolved in PBS after harvesting. By four rounds of freezing at −70° C. and thawing at 37° C., the outer membrane of the bacteria was destroyed by osmotic shock and the soluble periplasmic proteins including the scFvs were released into the supernatant. After elimination of intact cells and cell-debris by centrifugation, the supernatant containing the human anti-human CD3-scFvs was collected and used for further examination. These crude supernatants containing scFv will be further termed periplasmic preparations (PPP).

23.2 Binding of scFvs to Human CD3 Epsilon (aa 1-27)-Fc Fusion Protein

[0778] ELISA experiments were carried out by coating the human CD3 epsilon (aa 1-27)-Fc fusion protein to the wells of 96 well plastic plates (Nunc, maxisorb) typically at 4° C. over night. The antigen coating solution was then removed, wells washed once with PBS/0.05% Tween 20 and subsequently blocked with PBS/3% BSA for at least one hour. After removal of the blocking solution, PPPs and control solutions were added to the wells and incubated for typically one hour at room temperature. The wells were then washed three times with PBS/0.05% Tween 20. Detection of scFvs bound to immobilized antigen was carried out using a Biotin-labeled anti FLAG-tag antibody (M2 anti Flag-Bio, Sigma, typically at a final concentration of 1 μg/ml PBS) and detected with a peroxidase-labeled Streptavidine (Dianova, 1 μg/ml PBS). The signal was developed by adding ABTS substrate solution and measured at a wavelength of 405 nm. Unspecific binding of the test-samples to the blocking agent and/or the human IgG1 portion of the human CD3 epsilon (aa 1-27)-Fc fusion protein was examined by carrying out the identical assay with the identical reagents and identical timing on ELISA plates which were coated with human IgG1 (Sigma). PBS was used as a negative control.

[0779] As shown in FIG. 44, scFvs H2C, F12Q and I2C show strong binding signals on human CD3 epsilon (aa 1-27)-Fc fusion protein. The human scFvs 3-106, 3-114, 3-148, 3-190, 3-271, 4-10 and 4-48 (as described in WO 2004/106380) do not show any significant binding above negative control level.

[0780] To exclude the possibility that the positive binding of scFvs H2C, F12Q and I2C to wells coated with human CD3 epsilon (aa 1-27)-Fc fusion protein might be due to binding to BSA (used as a blocking agent) and/or the human IgG1 Fc-gamma-portion of the human CD3 epsilon (aa 1-27)-Fc fusion protein, a second ELISA experiment was performed in parallel. In this second ELISA experiment, all parameters were identical to those in the first ELISA experiment, except that in the second ELISA experiment human IgG1 (Sigma) was coated instead of human CD3 epsilon (aa 1-27)-Fc fusion protein. As shown in FIG. 45, none of the scFvs tested showed any significant binding to BSA and/or human IgG1 above background level.

[0781] Taken together, these results allow the conclusion that conventional CD3 binding molecules recognizing a context-dependent epitope of CD3 epsilon (e.g. as disclosed in WO 2004/106380) do not bind specifically to the human CD3 epsilon (aa 1-27)-region, whereas the scFvs H2C, F12Q and I2C binding a context-independent epitope of CD3 epsilon clearly show specific binding to the N-terminal 27 amino acids of human CD3 epsilon.

### 24. Generation and Characterization of PSCA and CD3 Cross-Species Specific Bispecific Single Chain Antibody Molecules

### 24.1 Generation of CHO Cells Expressing Human PSCA

[0782] The coding sequence of human PSCA as published in GenBank (Accession number NM_{—}005672) was obtained by gene synthesis according to standard protocols. The gene synthesis fragment was designed as to contain first a Kozak site for eukaryotic expression of the construct, followed by a 19 amino acid immunoglobulin leader peptide, followed in frame by the coding sequence of a FLAG tag, followed in frame by the coding sequence of the mature human PSCA protein and a stop codon (the corresponding sequences of the construct are listed under SEQ ID NOs. 443 and 444). The gene synthesis fragment was also designed as to introduce restriction sites at the beginning and at the end of the fragment. The introduced restriction sites, EcoRI at the 5′ end and SalI at the 3′ end, were utilised in the following cloning procedures. The gene synthesis fragment was cloned via EcoRI and SalI into a plasmid designated pEF-DHFR (pEF-DHFR is described in Raum et al. Cancer Immunol Immunother 50 (2001) 141-150) following standard protocols. The aforementioned procedures were carried out according to standard protocols (Sambrook, Molecular Cloning; A Laboratory Manual, 3rd edition, Cold Spring Harbour Laboratory Press, Cold Spring Harbour, N.Y. (2001)). A clone with sequence-verified nucleotide sequence was transfected into DHFR deficient CHO cells for eukaryotic expression of the construct. Eukaryotic protein expression in DHFR deficient CHO cells was performed as described by Kaufmann R. J. (1990) Methods Enzymol. 185, 537-566. Gene amplification of the construct was induced by increasing concentrations of methotrexate (MTX) to a final concentration of up to 20 nM MTX.

### 24.2 Generation of CHO Cells Expressing Macaque PSCA

[0783] The cDNA sequence of macaque PSCA was obtained by a PCR on cDNA from macaque monkey (cynomolgus) prostate prepared according to standard protocols.

[0784] The following reaction conditions: 1 cycle at 94° C. for 2 minutes followed by 40 cycles with 94° C. for 1 minute, 55° C. for 1 minute and 72° C. for 1 minute followed by a terminal cycle of 72° C. for 3 minutes and the following primers were used:

forward primer:

| | |
|---|---|
| 5′-CACCACAGCCCACCAGTGACC-3′ | (SEQ ID NO. 447) |
| reverse primer: | |
| 5′-GAGGCCTGGGGCACCACACCC-3′ | (SEQ ID NO. 448) |

[0785] The PCR reactions were performed under addition of PCR grade betain to a final concentration of 1M. This PCR generated a DNA fragment, which was isolated and sequenced according to standard protocols using the PCR primers, and thereby provided the cDNA sequence coding macaque PSCA. To generate a construct for expression of macaque PSCA a cDNA fragment was obtained by gene synthesis according to standard protocols (the corresponding sequences are listed under SEQ ID NOs: 445 and 446). The gene synthesis fragment was designed as to contain first a Kozak site for eukaryotic expression of the construct, followed by a 19 amino acid immunoglobulin leader peptide, followed in frame by the coding sequence of a FLAG tag, followed in frame by the coding sequence of the mature macaque PSCA protein and a stop codon. The gene synthesis fragment was also designed as to introduce restriction sites at the beginning and at the end of the fragment. The introduced restriction sites, EcoRI at the 5′ end and SalI at the 3′ end, were utilised in the following cloning procedures. The gene synthesis fragment was cloned via EcoRI and SalI into a plasmid designated pEF-DHFR (pEF-DHFR is described in Raum et al. Cancer Immunol Immunother 50 (2001) 141-150) following standard protocols. The aforementioned procedures were carried out according to standard protocols (Sambrook, Molecular Cloning; A Laboratory Manual, 3rd edition, Cold Spring Harbour Laboratory Press, Cold Spring Harbour, N.Y. (2001)). A clone with sequence-verified nucleotide sequence was transfected into DHFR deficient CHO cells for eukaryotic expression of the construct. Eukaryotic protein expression in DHFR deficient CHO cells was performed as described by Kaufmann R. J. (1990) Methods Enzymol. 185, 537-566. Gene amplification of the construct was induced by increasing concentrations of methotrexate (MTX) to a final concentration of up to 20 nM MTX.

### 24.3 Generation of PSCA and CD3 Cross-Species Specific Bispecific Single Chain Antibody Molecules

### Cloning of Cross-Species Specific PSCA×CD3 Bispecific Single Chain Antibody Molecules

[0786] Generally, bispecific single chain antibody molecules, each comprising a domain with a binding specificity cross-species specific for human and non-chimpanzee primate CD3 epsilon as well as a domain with a binding specificity cross-species specific for human and non-chimpanzee primate PSCA, were designed as set out in the following Table 7:

TABLE 7
Formats of anti-CD3 and anti-PSCA cross-species
specific bispecific single chain antibody
molecules

| SEQ ID | |
|---|---|
| NO. | Formats of protein constructs |
| (nucl/prot) | (N → C) |
| 390/389 | PSCA1HL × I2CHL |
| 422/421 | PSCA3HL × I2CHL |
| 440/439 | PSCA4HL × I2CHL |
| 392/391 | PSCA1LH × 12CHL |
| 406/405 | PSCA2LH × I2CHL |
| 424/423 | PSCA3LH × I2CHL |
| 442/441 | PSCA4LH × I2CHL |
| 1227/1226 | PC16E12HL × I2CHL |
| 1199/1198 | PC32D5HL × I2CHL |
| 1185/1184 | PC32B8HL × I2CHL |
| 1241/1240 | PC08F4HL × I2CHL |
| 1213/1212 | PC17D10HL × I2CHL |
| 1269/1268 | PC17H10HL × I2CHL |
| 1255/1254 | PC16F5HL × I2CHL |

[0787] The aforementioned constructs containing the variable light-chain (L) and variable heavy-chain (H) domains cross-species specific for human and macaque PSCA and the CD3 specific VH and VL combinations cross-species specific for human and macaque CD3 were obtained by gene synthesis. The gene synthesis fragments were designed and eukaryotic protein expression was performed in analogy to the procedure described in example 9 for the MCSP and CD3 cross-species specific single chain molecules.

### 24.4 Expression and Purification of the PSCA×CD3 Bispecific Single Chain Antibody Molecules

[0788] The bispecific single chain antibody molecules were expressed in Chinese hamster ovary cells (CHO) or HEK293 cells as described herein above for the MCSP×CD3 bispecific single chan antibodies.

[0789] The isolation and analysis of the expressed bispecific single chan antibodies has also been described herein above in Example 9.

### 24.5 Flow Cytometric Binding Analysis of the PSCA and CD3 Cross-Species Specific Bispecific Antibodies

[0790] In order to test the functionality of the cross-species specific bispecific antibody constructs regarding the capability to bind to human and macaque PSCA and CD3, respectively, a FACS analysis was performed. For this purpose CHO cells transfected with human PSCA as described in Example 24.1 and the human CD3 positive T cell leukemia cell line HPB-ALL (DSMZ, Braunschweig, ACC483) were used to test the binding to human antigens. The binding reactivity to macaque antigens was tested by using the generated macaque PSCA transfectant described in Example 24.2 and a macaque T cell line 4119LnPx (kindly provided by Prof Fickenscher, Hygiene Institute, Virology, Erlangen-Nuernberg; published in Knappe A, et al., and Fickenscher H., Blood 2000, 95, 3256-61). 200.000 cells of the respective cell lines were incubated for 30 min on ice with 50 μl of cell culture supernatant of transfected cells expressing the cross-species specific bispecific antibody constructs. The cells were washed twice in PBS with 2% FCS and binding of the construct was detected with a murine Penta His antibody (Qiagen; diluted 1:20 in 50 μl PBS with 2% FCS). After washing, bound anti His antibodies were detected with an Fc gamma-specific antibody (Dianova) conjugated to phycoerythrin, diluted 1:100 in PBS with 2% FCS. Supernatant of untransfected cells was used as a negative control.

[0791] Flow cytometry was performed on a FACS-Calibur apparatus, the CellQuest software was used to acquire and analyze the data (Becton Dickinson biosciences, Heidelberg). FACS staining and measuring of the fluorescence intensity were performed as described in Current Protocols in Immunology (Coligan, Kruisbeek, Margulies, Shevach and Strober, Wiley-Interscience, 2002).

[0792] The bispecific binding of the single chain molecules listed above, which are cross-species specific for PSCA and CD3 was clearly detectable as shown in FIGS. 46 and 48. In the FACS analysis all constructs showed binding to CD3 and PSCA compared to the negative control. Cross-species specificity of the bispecific antibodies to human and macaque CD3 and PSCA antigens, respectively, was demonstrated.

### 24.6 Bioactivity of PSCA and CD3 Cross-Species Specific Bispecific Single Chain Antibodies

[0793] Bioactivity of the generated bispecific single chain antibodies was analyzed by chromium 51 (⁵¹Cr) release in vitro cytotoxicity assays using the CHO cells transfected with human PSCA described in Example 24.1 and the CHO cells transfected with macaque PSCA described in Example 24.2. As effector cells stimulated human CD4/CD56 depleted PBMC or the macaque T cell line 4119LnPx were used, respectively.

[0794] The generation of stimulated human PBMC was described herein above in Example 11.

[0795] Target cells were prepared and the assay was performed in analogy to the procedure described for the MCSP×CD3 bispecific single chain antibodies in example 11.

[0796] As shown in FIGS. 47 and 49 all of the generated cross-species specific bispecific single chain antibody constructs demonstrated cytotoxic activity against human PSCA positive target cells elicited by stimulated human CD4/CD56 depleted PBMC and macaque PSCA positive target cells elicited by the macaque T cell line 4119LnPx.

### 24.7 Bispecific Single Chain Antibody Constructs Directed Against Human and Non-Chimpanzee Primate CD3 and PSCA

[0797] The human antibody germline VH sequence VH1 1-f (http://vbase.mrc-cpe.cam.ac.uk/) is chosen as framework context for CDRH1 (SEQ ID NO. 414), CDRH2 (SEQ ID NO. 415) and CDRH3 (SEQ ID NO. 416). Likewise the same human antibody germline VH sequence is chosen as framework context for CDRH1 (SEQ ID NO. 400), CDRH2 (SEQ ID NO. 401) and CDRH3 (SEQ ID NO. 402). For each human VH several degenerated oligonucleotides have to be synthesized that overlap in a terminal stretch of approximately 15-20 nucleotides. To this end every second primer is an antisense primer. For VH1 1-f the following set of oligonucleotides is used:

5′ P3-VH-A-XhoI
(SEQ ID NO. 449)
CCT GAT CTC GAG AGC GGC SCA GAS STG RAA AAG CCA
GGC GCC ACG GTG AAG ATT
5′ P3-VH-B
(SEQ ID NO. 450)
GGC GCC ACG GTG AAG ATT TCC TGC AAG SYC AGC GGC
WAC ACG TTC ACC GGC TAC TAC ATC CAC TGG GTG
3′ P3-VH-C
(SEQ ID NO. 451)
GTA GGA GGT GAA GCC GTT GTT GGG GTC CAC TCT GCC
SAT CCA TTC CAG GCY CTT CCC GKG GGM CTG TTK CAC
CCA GTG GAT GTA GTA
5′ P3-VH-D
(SEQ ID NO. 452)
AAC GGC TTC ACC TCC TAC AAC CAG AAG TTC AAG GGC
ARG GYC AYA MTK ACC GYG GAC AMG AGC ACC RRC ACC
GCC TAC ATG GAA CTG
3′ P3-VH-E
(SEQ ID NO. 453)
GCT GTC GAA GAA GTT GCC CRC GCA ATA GTA CAC GGC
GGT GTC CTC GCT GSK CAG GCT KCT CAG TTC CAT GTA
GGC GGT
3′ P3-VH-F-BstEII
(SEQ ID NO. 454)
CAC GTC GGT GAC CGT GGT TCC CTG GCC CCA GCT GTC
GAA GAA GTT GCC

[0798] As another set of oligonucleotides for VH1 1-f the following primers are used:

5′-PSCA2VH-A-XHO1
(SEQ ID NO. 455)
CAG GTG CTCGAG YCA GGC GCC GAA STG RWG AAG CCT GGC
GCC MCA GTG AAG MTA TCC TGC AAG GYC AGC GGC TAC
ACC TTC ACC AAC
3′-PSCA2VH-B
(SEQ ID NO. 456)
GCT GTC GCT GGG GTC GAT CCT GCC YAT CCA TTC CAG
GCC CYT GCC GGG CSY CTG TTK CAC CCA GTT CAG CCA
GTA GTT GGT GAA GGT GTA GCC
5′-PSCA2VH-C
(SEQ ID NO. 457)
AGG ATC GAC CCC AGC GAC AGC GAG ATC CAC TAC GAC
CAG AAG TTC AAG GAC ARA GYC ACC MTA ACC GYG GAC
AMG AGC ACC RRC ACC GCC TAC
3′-PSCA2VH-D
(SEQ ID NO. 458)
GGC CAG GGC GCA ATA GTA CAC GGC GGT GTC CTC GCT
TST CAG GCT GGA CAG CTS SAT GTA GGC GGT GYY GGT
GCT C
3′-PSCA2VH-E-BSTE2
(SEQ ID NO. 459)
AGA CAC GGT GAC CGT GGT GCC CTG GCC CCA GTA GGC
CAT GGC GTA GAT GCC GGT CAG GGC GCA ATA GTA CAC

[0799] Each of these primer sets spans over the whole corresponding VH sequence.

[0800] Within each set primers are mixed in equal amounts (e.g. 1 μl of each primer (primer stocks 20 to 100 μM) to a 20 μl PCR reaction) and added to a PCR mix consisting of PCR buffer, nucleotides and Taq polymerase. This mix is incubated at 94° C. for 3 minutes, 65° C. for 1 minute, 62° C. for 1 minute, 59° C. for 1 minute, 56° C. for 1 minute, 52° C. for 1 minute, 50° C. for 1 minute and at 72° C. for 10 minutes in a PCR cycler. Subsequently the product is run in an agarose gel electrophoresis and the product of a size from 200 to 400 isolated from the gel according to standard methods.

[0801] Each VH PCR product is then used as a template for a standard PCR reaction using primers that incorporate N-terminal and C-terminal suitable cloning restriction sites. The DNA fragment of the correct size (for a VH approximately 350 nucleotides) is isolated by agarose gel electrophoresis according to standard methods. In this way sufficient VH DNA fragment is amplified.

[0802] The human antibody germline VL sequence VklI A1 (http://vbase.mrc-cpe.cam.ac.uk/) is chosen as framework context for CDRL1 (SEQ ID NO. 409), CDRL2 (SEQ ID NO. 410) and CDRL3 (SEQ ID NO. 411). Likewise human antibody germline VL sequence VklI A19 (http://vbase.mrc-cpe.cam.ac.uk/) is chosen as framework context for CDRL1 (SEQ ID NO. 395), CDRL2 (SEQ ID NO. 396) and CDRL3 (SEQ ID NO. 397). For each human VL several degenerated oligonucleotides have to be synthesized that overlap in a terminal stretch of approximately 15-20 nucleotides. To this end every second primer is an antisense primer. Restriction sites needed for later cloning within the oligonucleotides are deleted. For VklI A1 the following oligonucleotides are used:

5′ P3-VL-A-SacI
(SEQ ID NO. 460)
CCT GTA GAG CTC GTC ATG ACC CAG TCC CCC CTG TCC
CTG MSC GTG ACC MTC GGC CAG CCA GCC AGC ATC
3′ P3-VL-B
(SEQ ID NO. 461)
CCA GTT CAG GTA GGT CTT GCC GTC GCT GTC CAG CAG
GGA CTG GCT GGA CTT GCA AGA GAT GCT GGC TGG CTG
GCC
5′ P3-VL-C
(SEQ ID NO. 462)
AAG ACC TAC CTG AAC TGG YTS CWG CAG AGG CCA GGC
CAG AGC CCC ARG AGG CTG ATC TAC CTG GTG TCC ACC
CTG
3′ P3-VL-D
(SEQ ID NO. 463)
GGT GAA GTC GGT GCC GGA GCC GCT GCC GGA GAA TCT
GTC TGG CAC GCC GCT GTC CAG GGT GGA CAC CAG GTA
5′ P3-VL-E
(SEQ ID NO. 464)
TCC GGC ACC GAC TTC ACC CTG AAG ATC AGC AGG GTG
GAG GCC GAG GAC STG GGC GTG TAC TAC TGC TGG CAG
GGC ACC
3′ P3-VL-F-BsiWI/SpeI
(SEQ ID NO. 465)
CCA GAC ACT AGT CGT ACG CTT GAT TTC CAG CTT GGT
CCC TCC GCC GAA GGT CCT TGG GAA GTG GGT GCC CTG
CCA GCA GTA

[0803] For VklI A19 the oligonucleotides are as follows:

5′-PSCA2VL-a-SAC1
(SEQ ID NO. 466)
CAG ACA GAG CTC GTG ATG ACC CAG KCA SCT CYA AGC
STG CCA GTG ACC CCA GGC GAG YCA GYG TCC ATC AGC
TGC AGG TCC AGC
3′-PSCA2VL-b
(SEQ ID NO. 467)
CTG GGG GCT CTG GCC TGG CYT CTG CAG AWA CCA GTA
CAG GTA GGT GTT GCC GTT GCT GTG CAG CAG GCT CTT
GCT GGA CCT GCA GCT GAT G
5′-PSCA2VL-c
(SEQ ID NO. 468)
CCA GGC CAG AGC CCC CAG CTG CTG ATC TAC AGG ATG
AGC AAC CTG GCT AGC GGC GTG CCA GAC AGA TTC AGC
GGC AGC GGC TCT GGA ACC
3′-PSCA2VL-d
(SEQ ID NO. 469)
CAG GCA GTA GTA CAC GCC CAC GTC CTC GGC CTC CAC
CCT GCT GAT CYT CAG GGT GAA GKC GGT TCC AGA GCC
GCT GCC
3′-PSCA2VL-e-BsiW1-Spe1
(SEQ ID NO. 470)
GTG CTG ACT AGT CGT ACG CTT GAT TTC CAG CTT GGT
CCC TTG GCC GAA GGT GTA GGG GTA TTC CAG GTG CTG
CAG GCA GTA GTA CAC GCC

[0804] Each of these primer sets spans over the whole corresponding VL sequence.

[0805] Within each set primers are mixed in equal amounts (e.g. 1 μl of each primer (primer stocks 20 to 100 μM) to a 20 μl PCR reaction) and added to a PCR mix consisting of PCR buffer, nucleotides and Taq polymerase. This mix is incubated at 94° C. for 3 minutes, 65° C. for 1 minute, 62° C. for 1 minute, 59° C. for 1 minute, 56° C. for 1 minute, 52° C. for 1 minute, 50° C. for 1 minute and at 72° C. for 10 minutes in a PCR cycler. Subsequently the product is run in an agarose gel electrophoresis and the product of a size from 200 to 400 isolated from the gel according to standard methods.

[0806] Each VL PCR product is then used as a template for a standard PCR reaction using primers that incorporate N-terminal and C-terminal suitable cloning restriction sites. The DNA fragment of the correct size (for a VL approximately 330 nucleotides) is isolated by agarose gel electrophoresis according to standard methods. In this way sufficient VL DNA fragment is amplified.

[0807] The final VH1 1-f (P3)-based VH PCR product (i.e. the repertoire of human/humanized VH) is then combined with the final VklI A1-based VL PCR product (i.e. the repertoire of human/humanized VL) and the final VH1 1-f (PSCA2)-based VH PCR product (i.e. the repertoire of human/humanized VH) with the final VklI A19-based VL PCR product (i.e. the repertoire of human/humanized VL) in the phage display vector pComb3H5Bhis to form two different libraries of functional scFvs from which—after display on filamentous phage—anti-PSCA binders are selected, screened, identified and confirmed as described as follows:

[0808] 450 ng of the light chain fragments (SacI-SpeI digested) are ligated with 1400 ng of the phagemid pComb3H5Bhis (SacI-SpeI digested; large fragment). The resulting combinatorial antibody library is then transformed into 300 ul of electrocompetent Escherichia coli XL1 Blue cells by electroporation (2.5 kV, 0.2 cm gap cuvette, 25 uFD, 200 Ohm, Biorad gene-pulser) resulting in a library size of more than 10⁷ independent clones. After one hour of phenotype expression, positive transformants are selected for carbenicilline resistance encoded by the pComb3H5BHis vector in 100 ml of liquid super broth (SB)-culture over night. Cells are then harvested by centrifugation and plasmid preparation is carried out using a commercially available plasmid preparation kit (Qiagen).

[0809] 2800 ng of this plasmid-DNA containing the VL-library (XhoI-BstEII digested; large fragment) are ligated with 900 ng of the heavy chain V-fragments (XhoI-BstEII digested) and again transformed into two 300 ul aliquots of electrocompetent E. coli XL1 Blue cells by electroporation (2.5 kV, 0.2 cm gap cuvette, 25 uFD, 200 Ohm) resulting in a total VH-VL scFv (single chain variable fragment) library size of more than 10⁷ independent clones.

[0810] After phenotype expression and slow adaptation to carbenicillin, the E. coli cells containing the antibody library are transferred into SB-Carbenicillin (50 ug/mL) selection medium. The E. coli cells containing the antibody library is then infected with an infectious dose of 10¹² particles of helper phage VCSM13 resulting in the production and secretion of filamentous M13 phage, wherein phage particle contains single stranded pComb3H5BHis-DNA encoding a scFv-fragment and displayed the corresponding scFv-protein as a translational fusion to phage coat protein III. This pool of phages displaying the antibody library is used for the selection of antigen binding entities.

[0811] For this purpose the phage library carrying the cloned scFv-repertoire is harvested from the respective culture supernatant by PEG8000/NaCl precipitation and centrifugation. Approximately 10¹¹ to 10¹² scFv phage particles are resuspended in 0.4 ml of PBS/0.1% BSA and incubated with 10⁵ to 10⁷ PSCA transfected CHO cells (see example 24.1) for 1 hour on ice under slow agitation. These PSCA transfected CHO cells are harvested beforehand by centrifugation, washed in PBS and resuspended in PBS/1% FCS (containing Na Azide). scFv phage which do not specifically bind to the PSCA transfected CHO cells are eliminated by up to five washing steps with PBS/1% FCS (containing Na Azide). After washing, binding entities are eluted from the cells by resuspending the cells in HCl-glycine pH 2.2 (10 min incubation with subsequent vortexing) and after neutralization with 2 M Tris pH 12, the eluate is used for infection of a fresh uninfected E. coli XL1 Blue culture (OD600>0.5). The E. coli culture containing E. coli cells successfully transduced with a phagemid copy, encoding a human/humanized scFv-fragment, are again selected for carbenicillin resistance and subsequently infected with VCMS 13 helper phage to start the second round of antibody display and in vitro selection. A total of 4 to 5 rounds of selections are carried out, normally.

[0812] In order to screen for PSCA specific binders plasmid DNA corresponding to 4 and 5 rounds of panning is isolated from E. coli cultures after selection. For the production of soluble scFv-protein, VH-VL-DNA fragments are excised from the plasmids (XhoI-SpeI). These fragments are cloned via the same restriction sites into the plasmid pComb3H5BFlag/His differing from the original pComb3H5BHis in that the expression construct (e.g. scFv) includes a Flag-tag (DYKDDDDK) between the scFv and the His6-tag and the additional phage proteins are deleted. After ligation, each pool (different rounds of panning) of plasmid DNA is transformed into 100 μl heat shock competent E. coli TG1 or XLI blue and plated onto carbenicillin LB-agar. Single colonies are picked into 100 ul of LB carb (50 ug/ml).

[0813] E. coli transformed with pComb3H5BHis containing a VL- and VH-segment produce soluble scFv in sufficient amounts after excision of the gene III fragment and induction with 1 mM IPTG. Due to a suitable signal sequence, the scFv-chain is exported into the periplasma where it folds into a functional conformation.

[0814] Single E. coli TG1 bacterial colonies from the transformation plates are picked for periplasmic small scale preparations and grown in SB-medium (e.g. 10 ml) supplemented with 20 mM MgCl₂ and carbenicillin 50 μg/ml (and re-dissolved in PBS (e.g. 1 ml) after harvesting. By four rounds of freezing at −70° C. and thawing at 37° C., the outer membrane of the bacteria is destroyed by temperature shock and the soluble periplasmic proteins including the scFvs are released into the supernatant. After elimination of intact cells and cell-debris by centrifugation, the supernatant containing the anti-PSCA scFvs is collected and used for the identification of PSCA specific binders as follows:

[0815] Binding of scFvs to PSCA is tested by flow cytometry on PSCA transfected CHO cells (see example 24.1); untransfected CHO cell are used as negative control. For flow cytometry 2.5×10⁵ cells are incubated with 50 ul of scFv periplasmic preparation or with 5 μg/ml of purified scFv in 50 μl PBS with 2% FCS. The binding of scFv is detected with an anti-His antibody (Penta-His Antibody, BSA free, Qiagen GmbH, Hilden, FRG) at 2 μg/ml in 50 μl PBS with 2% FCS. As a second step reagent a R-Phycoerythrin-conjugated affinity purified F(ab′)₂ fragment, goat anti-mouse IgG (Fc-gamma fragment specific), diluted 1:100 in 50 μl PBS with 2% FCS (Dianova, Hamburg, FRG) is used. The samples are measured on a FACSscan (BD biosciences, Heidelberg, FRG).

[0816] Single clones are then analyzed for favourable properties and amino acid sequence. PSCA specific scFvs are converted into recombinant bispecific single chain antibodies by joining them via a Gly₄Ser₁-linker with the CD3 specific scFv 120 (SEQ ID NO. 185) or any other CD3 specific scFv of the invention to result, for example, in constructs with the domain arrangement VH_{PSCA}-(Gly₄Ser₁)₃-VL_{PSCA}-Gly₄Ser₁-VH_{CD3}-(Gly₄Ser₁)₃-VL_{CD3} or VL_{PSCA}-(Gly₄Ser₁)₃-VH_{PSCA}-Gly₄Ser₁-VH_{CD3}-(Gly₄Ser₁)₃-VL_{CD3} or alternative domain arrangements. For expression in CHO cells the coding sequences of (i) an N-terminal immunoglobulin heavy chain leader comprising a start codon embedded within a Kozak consensus sequence and (ii) a C-terminal His₆-tag followed by a stop codon are both attached in frame to the nucleotide sequence encoding the bispecific single chain antibodies prior to insertion of the resulting DNA-fragment as obtained by gene synthesis into the multiple cloning site of the expression vector pEF-DHFR (Raum et al. Cancer Immunol Immunother 50 (2001) 141-150). Stable transfection of DHFR-deficient CHO cells, selection for DHFR-positive transfectants secreting the bispecific single chain antibodies into the culture supernatant and gene amplification with methotrexat for increasing expression levels are carried out as described (Mack et al. Proc. Natl. Acad. Sci. USA 92 (1995) 7021-7025). All other state of the art procedures are carried out according to standard protocols (Sambrook, Molecular Cloning; A Laboratory Manual, 3rd edition, Cold Spring Harbour Laboratory Press, Cold Spring Harbour, N.Y. (2001)).

[0817] Identification of functional bispecific single-chain antibody constructs is carried out by flowcytometric analysis of culture supernatant from transfected CHO cells. For this purpose CD3 binding is tested on the human CD3 positive T cell leukemia cell line HPB-ALL (DSMZ, Braunschweig, ACC483) and on the macaque T cell line 4119LnPx. Binding to tumor specific PSCA epitopes is tested on PSCA transfected CHO cells (see example 24.1). 200.000 cells of the respective cell line are incubated for 30 min. on ice with 50 μl of cell culture supernatant. The cells are washed twice in PBS with 2% FCS and bound bispecific single-chain antibody construct is detected with a murine anti-His antibody (Penta His antibody; Qiagen; diluted 1:20 in 50 μl PBS with 2% FCS). After washing, bound anti-His antibodies are detected with an Fc gamma-specific antibody (Dianova) conjugated to phycoerythrin, diluted 1:100 in PBS with 2% FCS. Supernatant of untransfected CHO cells is used as negative control.

[0818] Flow cytometry is performed on a FACS-Calibur apparatus; the CellQuest software is used to acquire and analyze the data (Becton Dickinson biosciences, Heidelberg). FACS staining and measuring of the fluorescence intensity are performed as described in Current Protocols in Immunology (Coligan, Kruisbeek, Margulies, Shevach and Strober, Wiley-Interscience, 2002).

[0819] Only those constructs showing bispecific binding to human and macaque CD3 as well as to human and macaque PSCA are selected for further use.

[0820] For protein production CHO cells expressing fully functional bispecific single chain antibody and adapted to nucleoside-free HyQ PF CHO liquid soy medium (with 4.0 mM L-Glutamine with 0.1% Pluronic F-68; HyClone) are grown in roller bottles with nucleoside-free HyQ PF CHO liquid soy medium (with 4.0 mM L-Glutamine with 0.1% Pluronic F-68; HyClone) for 7 days. Culture supernatant is cleared from cells by centrifugation and stored at −20° C. until purification. As chromatography equipment for purification of bispecific single chain antibody from culture supernatant Akta® Explorer System (GE Health Systems) and Unicorn® Software are used. Immobilized metal affinity chromatography (“IMAC”) is performed using a Fractogel EMD Chelate® (Merck) which is loaded with ZnCl₂ according to the protocol provided by the manufacturer. The column is equilibrated with buffer A (20 mM sodium phosphate buffer pH 7.2, 0.1 M NaCl) and the cell culture supernatant (500 ml) is applied to the column (10 ml) at a flow rate of 3 ml/min. The column is washed with buffer A to remove unbound sample. Bound protein is eluted using a two step gradient of buffer B (20 mM sodium phosphate buffer pH 7.2, 0.1 M NaCl, 0.5 M Imidazole) according to the following:

Step 1: 20% buffer B in 6 column volumes
Step 2: 100% buffer B in 6 column volumes

[0821] Eluted protein fractions from step 2 are pooled for further purification. All chemicals are of research grade and purchased from Sigma (Deisenhofen) or Merck (Darmstadt).

[0822] Gel filtration chromatography is performed on a HiLoad 16/60 Superdex 200 prep grade column (GE/Amersham) equilibrated with Equi-buffer (25 mM Citrate, 200 mM

[0823] Lysine, 5% Glycerol, pH 7.2). Eluted protein samples (flow rate 1 ml/min) are subjected to standard SDS-PAGE and Western Blot for detection. Prior to purification, the column is calibrated for molecular weight determination (molecular weight marker kit, Sigma MW GF-200). Protein concentrations are determined using OD280 nm.

[0824] Purified bispecific single chain antibody protein is analyzed in SDS PAGE under reducing conditions performed with pre-cast 4-12% Bis Tris gels (Invitrogen). Sample preparation and application are performed according to the protocol provided by the manufacturer. The molecular weight is determined with MultiMark protein standard (Invitrogen). The gel is stained with colloidal Coomassie (Invitrogen protocol). The purity of the isolated protein is >95% as determined by SDS-PAGE. The bispecific single chain antibody has a molecular weight of about 52 kDa under native conditions as determined by gel filtration in PBS. All constructs are purified according to this method.

[0825] Western Blot is performed using an Optitran® BA-S83 membrane and the Invitrogen Blot Module according to the protocol provided by the manufacturer. For detection of the bispecific single chain antibody protein antibodies an anti-His Tag antibody is used (Penta His, Qiagen). A Goat-anti-mouse Ig antibody labeled with alkaline phosphatase (AP) (Sigma) is used as secondary antibody and BCIP/NBT (Sigma) as substrate. A single band is detected at 52 kD corresponding to the purified bispecific single chain antibody.

[0826] The potency in the human and the non-chimpanzee primate system of bispecific single chain antibodies interacting with human and macaque CD3 and with human and macaque PSCA is determined by a cytotoxicity assay based on chromium 51 (⁵¹Cr) release using PSCA transfected CHO cells as target cells (see example 24.1) and stimulated human CD4/CD56 depleted PBMC or the macaque T cell line 4119LnPx as effector cells.

[0827] Generation of stimulated human PBMC is performed as follows: A Petri dish (85 mm diameter, Nunc) is coated with a commercially available anti-CD3 specific antibody (e.g. OKT3, Othoclone) in a final concentration of 1 μg/ml for 1 hour at 37° C. Unbound protein is removed by one washing step with PBS. The fresh PBMC are isolated from peripheral blood (30-50 ml human blood) by Ficoll gradient centrifugation according to standard protocols. 3-5×10⁷ PBMC are added to the precoated petri dish in 50 ml of RPMI 1640 with stabilized glutamine/10%

[0828] FCS/IL-2 20 U/ml (Proleukin, Chiron) and stimulated for 2 days. On the third day the cells are collected and washed once with RPMI 1640. IL-2 is added to a final concentration of 20 U/ml and the cells are cultivated again for one day in the same cell culture medium as above.

[0829] Target cells are washed twice with PBS and labelled with 11.1 MBq ⁵¹Cr in a final volume of 100 μl RPMI with 50% FCS for 45 minutes at 37° C. Subsequently the labelled target cells are washed 3 times with 5 ml RPMI and then used in the cytotoxicity assay. The assay is performed in a 96 well plate in a total volume of 250 μl supplemented RPMI (as above) with an E:T ratio of 10:1. 1 μg/ml of the cross-species specific bispecific single chain antibody molecules and 20 threefold dilutions thereof are applied. The assay time is 18 hours and cytotoxicity is measured as relative values of released chromium in the supernatant related to the difference of maximum lysis (addition of Triton-X) and spontaneous lysis (without effector cells). All measurements are done in quadruplicates. Measurement of chromium activity in the supernatants is performed with a Wizard 3″ gamma counter (Perkin Elmer Life Sciences GmbH, Köln, Germany). Analysis of the experimental data is performed with Prism 4 for Windows (version 4.02, GraphPad Software Inc., San Diego, Calif., USA). Sigmoidal dose response curves typically have R² values >0.90 as determined by the software. EC₅₀ values as measure of potency are calculated by the analysis program.

### 25. Generation and Characterization of CD19 and CD3 Cross-Species Specific Bispecific Single Chain Antibody Molecules

### 25.1. Cloning and Expression of Human CD19 Antigen on CHO Cells

[0830] The sequence of the human CD19 antigen (NM_{—}001770 Homo sapiens CD19 molecule (CD19), mRNA, National Center for Biotechnology Information, http://www.ncbi.nlm.nih.gov/entrez) was used to obtain a synthetic molecule by gene synthesis according to standard protocols. The gene synthesis fragment was also designed as to contain a Kozak site for eukaryotic expression of the construct and restriction sites at the beginning and the end of the DNA. The introduced restriction sites EcoRI at the 5′ end and SalI at the 3′ end were utilised during the cloning step into the expression plasmid designated pEFDHFR (Raum et al. Cancer Immunol Immunother 50 (2001) 141-150). After sequence verification the plasmid was used to transfect CHO/dhfr-cells as follows. A sequence verified plasmid was used to transfect CHO/dhfr-cells (ATCC No. CRL 9096; cultured in RPMI 1640 with stabilized glutamine obtained from Biochrom AG Berlin, Germany, supplemented with 10% FCS, 1% penicillin/streptomycin all obtained from Biochrom AG Berlin, Germany and nucleosides from a stock solution of cell culture grade reagents obtained from Sigma-Aldrich Chemie GmbH, Taufkirchen, Germany, to a final concentration of 10 μg/ml Adenosine, 10 μg/ml Deoxyadenosine and 10 μg/ml Thymidine, in an incubator at 37 C, 95% humidity and 7% CO2). Transfection was performed using the PolyFect Transfection Reagent (Qiagen GmbH, Hilden, Germany) and 5 μg of plasmid DNA according to the manufacturer's protocol. After culture period of 24 hours cells were washed once with PBS and again cultured in the aforementioned cell culture medium except that the medium was not supplemented with nucleosides and dialysed FCS (obtained from Biochrom AG Berlin, Germany) was used. Thus the cell culture medium did not contain nucleosides and thereby selection was applied on the transfected cells. Approximately 14 days after transfection the outgrowth of resistant cells was observed. After an additional 7 to 14 days the transfectants were tested positive for expression of the construct via FACS. Eukaryotic protein expression in DHFR deficient CHO cells is performed as described by Kaufmann R. J. (1990) Methods Enzymol. 185, 537-566. Gene amplification of the construct is induced by increasing concentrations of methothrexate (MTX) to a final concentration of up to 20 nM MTX.

### 25.2. Generation of CD19 and CD3 Cross-Species Specific Bispecific Single Chain Molecules

[0831] Generally, bispecific single chain antibody molecules, each comprising a domain with a binding specificity for the human and the macaque CD3 antigen as well as a domain with a binding specificity for the human CD19 antigen, were designed as set out in the following Table 8:

TABLE 8
Formats of anti-CD3 and anti-CD19 cross-species
specific bispecific single chain antibody
molecules

| SEQ ID | Formats of protein constructs |
|---|---|
| (nucl/prot) | (N → C) |
| 482/481 | HD37 LH × I2C HL |
| 486/485 | HD37 LH × F12Q HL |
| 484/483 | HD37 LH × H2C HL |
| 534/533 | hCD19 47-A3 LH × I2C HL |
| 522/521 | hCD19 46-B11LH × I2C HL |
| 510/509 | hCD19 45-A10 LH × I2C HL |
| 498/497 | hCD19 26-D6 LH × I2C HL |
| 546/545 | HD37-DT LH × I2C HL |
| 558/557 | HD37-A LH × I2C HL |
| 570/569 | HD37-G LH × I2C HL |
| 582/581 | HD37-S LH × I2C HL |
| 594/593 | HD37-T LH × I2C HL |
| 606/605 | HD37-I LH × I2C HL |
| 618/617 | HD37-L LH × I2C HL |
| 630/629 | HD37-V LH × I2C HL |
| 642/641 | HD37-E LH × I2C HL |
| 654/653 | HD37-Q LH × I2C HL |
| 666/665 | HD37-N LH × I2C HL |
| 678/677 | HD37-K LH × I2C HL |
| 690/689 | HD37-R LH × I2C HL |
| 702/701 | HD37-H LH × I2C HL |
| 714/713 | HD37-Y LH × I2C HL |
| 726/725 | HD37-P LH × I2C HL |
| 738/737 | HD37-F LH × I2C HL |
| 750/749 | HD37-W LH × I2C HL |
| 762/761 | HD37-M LH × I2C HL |
| 1283/1282 | hCD19 5-A9 LH × I2C HL |
| 1297/1296 | hCD19 2-C6 LH × I2C HL |
| 1311/1310 | hCD19 4-C7 LH × I2C HL |
| 1325/1324 | hCD19 2-D7 LH × I2C HL |
| 1339/1338 | hCD19 2-D4 LH × I2C HL |
| 1353/1352 | hCD19 5-G3 LH × I2C HL |
| 1367/1366 | hCD19 4-E10 LH × I2C HL |
| 1381/1380 | hCD19 4-E3 LH × I2C HL |
| 1395/1394 | hCD19 3-H7 LH × I2C HL |

[0832] The aforementioned constructs containing the variable light-chain (L) and variable heavy-chain (H) domains specific for human CD19 and the CD3 specific VH and VL combinations cross-species specific for human and macaque CD3 were obtained by gene synthesis. The gene synthesis fragments were designed and eukaryotic protein expression was performed in analogy to the procedure described in example 9 for the MCSP×CD3 cross-species specific single chain molecules.

### 25.3. Expression and Purification of the Bispecific Single Chain Antibody Molecules

[0833] The bispecific single chain antibody molecules were expressed in chinese hamster ovary cells (CHO) or HEK 293 cells as described herein above for the MCSP×CD3 bispecific single chain antibodies.

[0834] The isolation and analysis of the expressed bispecific single chain antibodies has also been described herein above in Example 9.

### 25.4. Flow Cytometric Binding Analysis of the CD19 and CD3 Cross-Species Specific Bispecific Antibodies

[0835] In order to test the functionality of the cross-species specific bispecific antibody constructs with regard to binding capability to human CD19 as well as to human and macaque CD3, a FACS analysis was performed. For this purpose the CHO cells transfected with human CD19 as described in example 25.1 and human CD3 positive T cell leukemia cell line HPB-ALL (DSMZ, Braunschweig, ACC483) were used to check the binding to human antigens. The binding reactivity to macaque CD3 was tested by using a macaque T cell line 4119LnPx (kindly provided by Prof Fickenscher, Hygiene Institute, Virology, Erlangen-Nuernberg; Knappe A, et al., and Fickenscher H: Herpesvirus saimiri-transformed macaque T cells are tolerated and do not cause lymphoma after autologous reinfusion. Blood 2000; 95:3256-61.) 200,000 cells of the respective cell population were incubated for 30 min on ice with 50 μl of the purified protein of the cross-species specific bispecific antibody constructs (e.g. 2 μg/ml) Alternatively the cell culture supernatant of transiently produced proteins was used. The cells were washed twice in PBS and binding of the construct was detected with an unlabeled murine Penta His antibody (Qiagen; diluted 1:20 in 50 μl PBS with 2% FCS). After washing, bound anti His antibodies were detected with an Fc gamma-specific antibody (Dianova) conjugated to phycoerythrin, diluted 1:100 in 50 μl PBS with 2% FCS. Fresh culture medium was used as a negative control.

[0836] Flow cytometry was performed on a FACS-Calibur apparatus, the CellQuest software was used to aquire and analyze the data (Becton Dickinson biosciences, Heidelberg). FACS staining and measuring of the fluorescence intensity were performed as described in Current Protocols in Immunology (Coligan, Kruisbeek, Margulies, Shevach and Strober, Wiley-Interscience, 2002).

[0837] In the FACS analysis shown in FIG. 50 all tested constructs showed binding to human and macaque CD3 and to human CD19.

### 25.5. Bioactivity of CD19 and CD3 Cross-Species Specific Bispecific Single Chain Antibodies

[0838] The bioactivity of bispecific single chain antibodies was analyzed by chromium 51 release in vitro cytotoxicity assays using the CD19 positive cell line described in example 25.1. As effector cells stimulated human CD8 positive T cells or the macaque T cell line 4119LnPx were used.

[0839] The generation of stimulated human PBMC was described herein above in Example 11.

[0840] Target cells prepared and the assay was performed in analogy to the procedure described for the MCSP×CD3 bispecific single chain antibodies in example 11. In the T cell cytotoxicity assay shown in FIG. 51 all tested bispecific single chain antibody constructs revealed cytotoxic activity against human CD19 positive target cells elicited by human CD8+ cells and against human CD19 positive target cells elicited by the macaque T cell line 4119LnPx. As a negative control, an irrelevant bispecific single chain antibody was used.

### 25.6. Generation of Additional CD19 and CD3 Cross-Species Specific Bispecific Single Chain Molecules

[0841] The human antibody germline VH sequence VH1 1-46 (http://vbase.mrc-cpe.cam.ac.uk/) is chosen as framework context for CDRH1 (SEQ ID NO 473), CDRH2 (SEQ ID NO 474) and CDRH3 (SEQ ID NO 475). For the human VH several degenerated oligonucleotides have to be synthesized that overlap in a terminal stretch of approximately 15-20 nucleotides. To this end every second primer is an antisense primer. For VH1 1-46 the following oligonucleotides are used (5′- to 3′):

5′-37VH-aXho1
(SEQ ID NO 763)
CAG CTG CTC GAG TCT GGG GCT GAG STG RWG ARG CCT
GGG KCC TCA GTG AAG RTT TCC TGC AAG GCT TCT GGC
3′-37VH-b
(SEQ ID NO 764)
cca ctc aag acc ctg tcc agg GSS ctg cYt cac cca
gtt cat cca gta gct aGw gaa tgY ata gcc aga agc
ctt gca gga
5′-37VH-c
(SEQ ID NO 765)
GGA CAG GGT CTT GAG TGG ATK GGA CAG ATT TGG CCT
GGA GAT GGT GAT ACT AAC TAC AAT GGA AAG TTC AAG
3′-37VH-d
(SEQ ID NO 766)
cag gct gct gag ttS cat gta gRc tgt gct ggt gga
tKY gtc ASS agt caK agt gRc tYt acc ctt gaa ctt
tcc att gta g
5′-37VH-e
(SEQ ID NO 767)
C ATG SAA CTC AGC AGC CTG SSA TCT GAG GAC ACT GCG
GTC TAT TWC TGT GCA AGA CGG GAG ACT ACG ACG G
3′-37VH-fBstE2
(SEQ ID NO 768)
gga gac ggt gac cgt ggt ccc ttg gcc cca gta gtc
cat agc ata gta ata acg gcc tac cgt cgt agt ctc
ccg tct tgc

[0842] This primer set spans over the whole corresponding VH sequence.

[0843] Within the set primers are mixed in equal amounts (e.g. 1 μl of each primer (primer stocks 20 to 100 μM) to a 20 μl PCR reaction) and added to a PCR mix consisting of PCR buffer, nucleotides and Taq polymerase. This mix is incubated at 94° C. for 3 minutes, 65° C. for 1 minute, 62° C. for 1 minute, 59° C. for 1 minute, 56° C. for 1 minute, 52° C. for 1 minute, 50° C. for 1 minute and at 72° C. for 10 minutes in a PCR cycler. Subsequently the product is run in an agarose gel electrophoresis and the product of a size from 200 to 400 isolated from the gel according to standard methods.

[0844] The VH PCR product is then used as a template for a standard PCR reaction using primers that incorporate N-terminal and C-terminal suitable cloning restriction sites. The DNA fragment of the correct size (for a VH approximately 350 nucleotides) is isolated by agarose gel electrophoresis according to standard methods. In this way sufficient VH DNA fragment is amplified.

[0845] The human antibody germline VL sequence Vkl O12 (http://vbase.mrc-cpe.cam.ac.uk/) is chosen as framework context for CDRL1 (SEQ ID NO 478), CDRL2 (SEQ ID NO 479) and CDRL3 (SEQ ID NO 480). For the human VL several degenerated oligonucleotides have to be synthesized that overlap in a terminal stretch of approximately 15-20 nucleotides. To this end every second primer is an antisense primer. Restriction sites needed for later cloning within the oligonucleotides are deleted. For Vkl 012 the following oligonucleotides are used (5′- to 3′):

5′-37VL-A-SacI
(SEQ ID NO 769)
CAG CTG GAG CTC CAG ATG ACC CAG TCT CCA KCT TCT
TTG KCT GYG TCT STA GGG SAS AGA GYC ACC ATC WCC
TGC AAG GCC AGC
3′-37VL-B
(SEQ ID NO 770)
ctg ttg gta cca gtt caa ata aSt SNN acc atc ata
atc aac act ttg gct ggc ctt gca ggt gat ggt
5′-37VL-C
(SEQ ID NO 771)
TTG AAC TGG TAC CAA CAG AWA CCA GGA MAG SCA CCC
AAA CTC CTC ATC TAT GAT GCA TCC AAT CTA GTT TCT
3′-37VL-D
(SEQ ID NO 772)
gag ggt gaa gtc tgt ccc aga ccc act gcc act aaa
cct ggR tgg gaY ccc aga aac tag att gga tgc
5′-37VL-E
(SEQ ID NO 773)
GGG ACA GAC TTC ACC CTC AMC ATC MRT YCT STG SAG
MMG GWG GAT KYC GCA ACC TAT YAC TGT CAG CAA AGT
ACT GAG
3′-37VL-F-BsiW1Spe1
(SEQ ID NO 774)
ACT CAG ACT AGT CGT ACG ttt gat ctc cac ctt ggt
ccc ttg acc gaa cgt cca cgg atc ctc agt act ttg
ctg aca g

[0846] This primer sets spans over the whole corresponding VL sequence.

[0847] Within the set primers are mixed in equal amounts (e.g. 1 μl of each primer (primer stocks 20 to 100 μM) to a 20 μl PCR reaction) and added to a PCR mix consisting of PCR buffer, nucleotides and Taq polymerase. This mix is incubated at 94° C. for 3 minutes, 65° C. for 1 minute, 62° C. for 1 minute, 59° C. for 1 minute, 56° C. for 1 minute, 52° C. for 1 minute, 50° C. for 1 minute and at 72° C. for 10 minutes in a PCR cycler. Subsequently the product is run in an agarose gel electrophoresis and the product of a size from 200 to 400 isolated from the gel according to standard methods.

[0848] The VL PCR product is then used as a template for a standard PCR reaction using primers that incorporate N-terminal and C-terminal suitable cloning restriction sites. The DNA fragment of the correct size (for a VL approximately 330 nucleotides) is isolated by agarose gel electrophoresis according to standard methods. In this way sufficient VL DNA fragment is amplified.

[0849] The final VH1 1-46-based VH PCR product (i.e. the repertoire of human/humanized VH) is then combined with the final Vkl O12-based VL PCR product (i.e. the repertoire of human/humanized VL) in the phage display vector pComb3H5Bhis to form a library of functional scFvs from which—after display on filamentous phage—anti-CD19 binders are selected, screened, identified and confirmed as described in the following:

[0850] 450 ng of the light chain fragments (SacI-SpeI digested) are ligated with 1400 ng of the phagemid pComb3H5Bhis (SacI-SpeI digested; large fragment). The resulting combinatorial antibody library is then transformed into 300 μl of electrocompetent Escherichia coli XL1 Blue cells by electroporation (2.5 kV, 0.2 cm gap cuvette, 25 μFD, 200 Ohm, Biorad gene-pulser) resulting in a library size of more than 107 independent clones. After one hour of phenotype expression, positive transformants are selected for carbenicilline resistance encoded by the pComb3H5BHis vector in 100 ml of liquid super broth (SB)-culture over night. Cells are then harvested by centrifugation and plasmid preparation is carried out using a commercially available plasmid preparation kit (Qiagen).

[0851] 2800 ng of this plasmid-DNA containing the VL-library (XhoI-BstEII digested; large fragment) are ligated with 900 ng of the heavy chain V-fragments (XhoI-BstEII digested) and again transformed into two 300 μl aliquots of electrocompetent E. coli XL1 Blue cells by electroporation (2.5 kV, 0.2 cm gap cuvette, 25 μFD, 200 Ohm) resulting in a scFv library with a size of more than 107 independent clones.

[0852] After phenotype expression and slow adaptation to carbenicilline, the E. coli cells containing the antibody library are transferred into SB-carbenicilline (SB with 50 μg/mL carbenicilline) selection medium. The E. coli cells containing the antibody library are then infected with an infectious dose of 1012 particles of helper phage VCSM13 resulting in the production and secretion of filamentous M13 phage, wherein each phage particle contains single stranded pComb3H5BHis-DNA encoding a scFv-fragment and displays the corresponding scFv-protein as a translational fusion to phage coat protein III. This pool of phages displaying the antibody library is used for the selection of antigen binding entities.

[0853] For this purpose the phage library carrying the cloned scFv-repertoire is harvested from the respective culture supernatant by PEG8000/NaCl precipitation and centrifugation. Approximately 1011 to 1012 scFv phage particles are resuspended in 0.4 ml of PBS/0.1% BSA and incubated with 105 to 107 CD19 transfected CHO cells (see example 1) for 1 hour on ice under slow agitation. These CD19 transfected CHO cells are harvested beforehand by centrifugation, washed in PBS and resuspended in PBS/1% FCS (containing Na Azide). scFv phage which do not specifically bind to the CD19 transfected CHO cells are eliminated by up to five washing steps with PBS/1 FCS (containing Na Azide). After washing, binding entities are eluted from the cells by resuspending the cells in HCl-glycine pH 2.2 (10 min incubation with subsequent vortexing) and after neutralization with 2 M Tris pH 12, the eluate is used for infection of a fresh uninfected E. coli XL1 Blue culture (OD600>0.5). The E. coli culture containing E. coli cells successfully transduced with a phagemid copy, encoding a human/humanized scFv-fragment, are again selected for carbenicilline resistance and subsequently infected with VCMS 13 helper phage to start the second round of antibody display and in vitro selection. A total of 4 to 5 rounds of selections are carried out, normally.

[0854] In order to screen for CD19 specific binders plasmid DNA corresponding to 4 and 5 rounds of panning is isolated from E. coli cultures after selection. For the production of soluble scFv-protein, the scFv-DNA fragments are excised from the plasmids (XhoI-SpeI). These fragments are cloned via the same restriction sites into the plasmid pComb3H5BFlag/His differing from the original pComb3H5BHis in that the expression construct (i.e. the scFv) includes a Flag-tag (DYKDDDDK, SEQ ID NO 775) at its C-terminus before the His6-tag and that phage protein III/N2 domain and protein III/CT domain had been deleted. After ligation, each pool (different rounds of panning) of plasmid DNA is transformed into 100 μl heat shock competent E. coli TG1 or XLI blue and plated onto carbenicilline LB-agar. Single colonies are picked into 100 μl of LB carb (LB with 50 μg/ml carbenicilline).

[0855] E. coli transformed with pComb3H5BFlag/His containing a scFv-DNA fragment produce soluble scFv-protein in sufficient amounts after induction with 1 mM IPTG. Due to a suitable signal sequence, the scFv is exported into the periplasma where it folds into a functional conformation.

[0856] Single E. coli TG1 bacterial colonies from the transformation plates are picked for periplasmic small scale preparations and grown in SB-medium (e.g. 10 ml) supplemented with 20 mM MgCl2 and carbenicilline 50 μg/ml (and re-dissolved in PBS (e.g. 1 ml) after harvesting. A temperature shock is applied by four rounds of freezing at −70° C. and thawing at 37° C. whereby the outer membrane of the bacteria is destroyed and the soluble periplasmic proteins including the scFvs are released into the supernatant. After elimination of intact cells and cell-debris by centrifugation, the supernatant containing the anti-CD19 scFvs is collected and used for the identification of CD19 specific binders as follows:

[0857] Binding of scFvs to CD19 is tested by flow cytometry on CD19 transfected CHO cells (see example 25.1); untransfected CHO cells are use as negative control.

[0858] For flow cytometry 2.5×105 cells are incubated with 50 μl of scFv periplasmic preparation or with 5 μg/ml of purified scFv in 50 μl PBS with 2% FCS. The binding of scFv is detected with an anti-His antibody (Penta-His Antibody, BSA free, Qiagen GmbH, Hilden, FRG) at 2 μg/ml in 50 μl PBS with 2% FCS. As a second step reagent a R-Phycoerythrin-conjugated affinity purified F(ab′)2 fragment, goat anti-mouse IgG (Fc-gamma fragment specific), diluted 1:100 in 50 μl PBS with 2% FCS (Dianova, Hamburg, FRG) is used. The samples are measured on a FACSscan (BD biosciences, Heidelberg, FRG).

[0859] Single clones are then analyzed for favourable properties and amino acid sequence. CD19 specific scFvs are converted into recombinant bispecific single chain antibodies by joining them via a Gly4Ser1-linker with the CD3 specific scFv 120 (amino acid sequence SEQ ID NO 185, nucleic acid sequence SEQ ID NO 186) or any other CD3 specific scFv of the invention to result in constructs with the domain arrangement VLCD19-(Gly4Ser1)₃-VHCD19-Gly4Ser1-VHCD3-(Gly4Ser1)₃-VLCD3. For expression in CHO cells the coding sequences of (i) an N-terminal immunoglobulin heavy chain leader comprising a start codon embedded within a Kozak consensus sequence and (ii) a C-terminal His6-tag followed by a stop codon are both attached in frame to the nucleotide sequence encoding the bispecific single chain antibodies prior to insertion of the resulting DNA-fragment as obtained by gene synthesis into the multiple cloning site of the expression vector pEF-DHFR (Raum et al. Cancer Immunol Immunother 50 (2001) 141-150). Transfection of the generated expression plasmids, protein expression and purification of cross-species specific bispecific antibody constructs are performed as described in Examples 25.2 and 25.3. All other state of the art procedures are carried out according to standard protocols (Sambrook, Molecular Cloning; A Laboratory Manual, 3rd edition, Cold Spring Harbour Laboratory Press, Cold Spring Harbour, N.Y. (2001)). Identification of functional bispecific single-chain antibody constructs is carried out by flow cytometric binding analysis of culture supernatant from transfected cells expressing the cross-species specific bispecific antibody constructs. Analysis is performed as described in Example 25.4.

[0860] Only those constructs showing bispecific binding to human and macaque CD3 as well as to CD19 are selected for further use.

[0861] The cytotoxic activity of cross-species specific bispecific single chain antibody constructs against CD19 positive target cells elicited by effector T cells is analyzed as described in Example 25.5. CHO-cells transfected with human CD19 are used as target cells and stimulated CD4/CD56-depleted human PBMCs or the macaque T cell line 4119LnPx as effector T cells. Only those constructs showing potent redirected T cell cytotoxicity against CD19-positive target cells are selected for further use.

### 26. Generation and Characterization of C-MET and CD3 Cross-Species Specific Bispecific Single Chain Antibody Molecules

### 26.1 Generation of CHO Cells Expressing Human C-MET

[0862] The coding sequence of human C-MET as published in GenBank (Accession number NM_{—}000245) was obtained by gene synthesis according to standard protocols. The gene synthesis fragment was designed as to contain first a Kozak site for eukaryotic expression of the construct followed by the coding sequence of the human C-MET protein and a stop codon (the cDNA and amino acid sequence of the construct is listed under SEQ ID Nos 776 and 777). The gene synthesis fragment was also designed as to introduce restriction sites at the beginning and at the end of the fragment. The introduced restriction sites, EcoRI at the 5′ end and SalI at the 3′ end, were utilised in the following cloning procedures. Internal restriction sites were removed by silent mutation of the coding sequence in the gene synthesis fragment (SalI: nucleotide 366 from C to G; EcoRI and XbaI: nucleotides 2059 to 2061 from TCT to AGC; EcoRI: nucleotide 2304 from T to C). The gene synthesis fragment was cloned via EcoRI and SalI into a plasmid designated pEF-DHFR (pEF-DHFR is described in Raum et al. Cancer Immunol Immunother 50 (2001) 141-150) following standard protocols. The aforementioned procedures were carried out according to standard protocols (Sambrook, Molecular Cloning; A Laboratory Manual, 3rd edition, Cold Spring Harbour Laboratory Press, Cold Spring Harbour, N.Y. (2001)). A clone with sequence-verified nucleotide sequence was transfected into DHFR deficient CHO cells for eukaryotic expression of the construct. Eukaryotic protein expression in DHFR deficient CHO cells was performed as described by Kaufmann R. J. (1990) Methods Enzymol. 185, 537-566. Gene amplification of the construct was induced by increasing concentrations of methotrexate (MTX) to a final concentration of up to 20 nM MTX.

### 26.2 Generation of CHO Cells Expressing Macaque C-MET

[0863] The cDNA sequence of macaque C-MET (cynomolgus) was obtained by a set of 5 PCRs on cDNA from macaque monkey Liver prepared according to standard protocols. The following reaction conditions: 1 cycle at 94° C. for 2 minutes followed by 40 cycles with 94° C. for 1 minute, 56° C. for 1 minute and 72° C. for 3 minutes followed by a terminal cycle of 72° C. for 3 minutes and the following primers were used:

| | | |
|---|---|---|
| 4. | forward primer: 5′-aggaattcaccatgaaggcccccgctgtgcttgcacc-3′ | (SEQ ID NO: 778) |
| | reverse primer: 5′-ctccagaggcatttccatgtagg-3′ | (SEQ ID NO: 779) |
| 5. | forward primer: 5′-gtccaaagggaaactctagatgc-3′ | (SEQ ID NO: 780) |
| | reverse primer: 5′-ggagacactggatgggagtccagg-3′ | (SEQ ID NO: 781) |
| 6. | forward primer: 5′-catcagagggtcgcttcatgcagg-3′ | (SEQ ID NO: 782) |
| | reverse primer: 5′-gctttggttttcagggggagttgc-3′ | (SEQ ID NO: 783) |
| 7. | forward primer: 5′-atccaaccaaatcttttattagtggtgg-3′ | (SEQ ID NO: 784) |
| | reverse primer: 5′-gacttcattgaaatgcacaatcagg-3′ | (SEQ ID NO: 785) |
| 8. | forward primer: 5′-tgctctaaatccagagctggtcc-3′ | (SEQ ID NO: 786) |
| | reverse primer: 5′-gtcagataagaaattccttagaatcc-3′ | (SEQ ID NO: 787) |

[0864] These PCRs generated five overlapping fragments, which were isolated and sequenced according to standard protocols using the PCR primers, and thereby provided a portion of the cDNA sequence coding macaque C-MET from codon 10 of the leader peptide to the last codon of the mature protein. To generate a construct for expression of macaque C-MET a cDNA fragment was obtained by gene synthesis according to standard protocols (the cDNA and amino acid sequence of the construct is listed under SEQ ID Nos 788 and 789). In this construct the coding sequence of macaque C-MET from amino acid 10 of the leader peptide to the last amino acid of the mature C-MET protein followed by a stop codon was fused in frame to the coding sequence of the amino acids 1 to 9 of the leader peptide of the human C-MET protein. The gene synthesis fragment was also designed as to contain a Kozak site for eukaryotic expression of the construct and restriction sites at the beginning and the end of the fragment containing the cDNA. The introduced restriction sites, EcoRI at the 5′ end and SalI at the 3′ end, were utilised in the following cloning procedures. Internal restriction sites were removed by silent mutation of the coding sequence in the gene synthesis fragment (SalI: nucleotide 366 from C to G; EcoRI: nucleotide 2055 from G to C). The gene synthesis fragment was cloned via EcoRI and SalI into a plasmid designated pEF-DHFR (pEF-DHFR is described in Raum et al. Cancer Immunol Immunother 50 (2001) 141-150) following standard protocols. The aforementioned procedures were carried out according to standard protocols (Sambrook, Molecular Cloning; A Laboratory Manual, 3rd edition, Cold Spring Harbour Laboratory Press, Cold Spring Harbour, N.Y. (2001)). A clone with sequence-verified nucleotide sequence was transfected into DHFR deficient CHO cells for eukaryotic expression of the construct. Eukaryotic protein expression in DHFR deficient CHO cells was performed as described by Kaufmann R. J. (1990) Methods Enzymol. 185, 537-566. Gene amplification of the construct was induced by increasing concentrations of methotrexate (MTX) to a final concentration of up to 20 nM MTX.

### 26.3 Generation of C-MET and CD3 Cross-Species Specific Bispecific Single Chain Molecules

### Cloning of Cross-Species Specific Binding Molecules

[0865] Generally, bispecific single chain antibody molecules, each comprising a domain with a binding specificity cross-species specific for human and non-chimpanzee primate

[0866] CD3epsilon as well as a domain with a binding specificity for C-MET, were designed as set out in the following Table 9:

TABLE 9
Formats of anti-C-MET and anti-CD3 cross-species
specific bispecific single chain antibody
molecules

| SEQ ID | Formats of protein constructs |
|---|---|
| (nucl/prot) | (N → C) |
| 830/829 | MET1HL × I2CHL |
| 854/853 | MET4HL × I2CHL |
| 872/871 | MET5HL × I2CHL |
| 890/889 | MET6HL × I2CHL |
| 832/831 | MET1LH × 12CHL |
| 856/855 | MET4LH × I2CHL |
| 874/873 | MET5LH × I2CHL |
| 892/891 | MET6LH × I2CHL |
| 906/905 | MET7LH × I2CHL |

[0867] The aforementioned constructs containing the variable light-chain (L) and variable heavy-chain (H) domains specific for C-MET and the CD3 specific VH and VL combinations cross-species specific for human and macaque CD3 were obtained by gene synthesis. The gene synthesis fragments were designed and eukaryotic protein expression was performed in analogy to the procedure described in example 9 for the MCSP×CD3 cross-species specific single chain molecules. The bispecific single chain antibody molecules were expressed in chinese hamster ovary cells (CHO) or HEK 293 cells as described herein above for the MCSP×CD3 bispecific single chain antibodies.

[0868] The isolation and analysis of the expressed bispecific single chain antibodies has also been described herein above in Example 9.

[0869] As shown in FIG. 55 all of the generated cross-species specific bispecific single chain antibody constructs demonstrated cytotoxic activity against macaque cMET positive target cells elicited by the macaque T cell line 4119LnPx.

### 26.5 Flow Cytometric Binding Analysis of the C-MET and CD3 Cross-Species Specific Bispecific Antibodies

[0870] In order to test the functionality of the cross-species specific bispecific antibody constructs regarding the capability to bind to C-MET and human and macaque CD3, respectively, a FACS analysis was performed. For this purpose the human C-MET positive breast cancer cell line MDA-MB-231 (ATCC No. HTB-26) and the human CD3 positive T cell leukemia cell line HPB-ALL (DSMZ, Braunschweig, ACC483) were used to test the binding to human antigens. The binding reactivity to macaque CD3 was tested by using the macaque T cell line 4119LnPx (kindly provided by Prof Fickenscher, Hygiene Institute, Virology, Erlangen-Nuernberg; published in Knappe A, et al., and Fickenscher H., Blood 2000, 95, 3256-61). 200.000 cells of the respective cell lines were incubated for 30 min on ice with 50 μl of cell culture supernatant of transfected cells expressing the cross-species specific bispecific antibody constructs. The cells were washed twice in PBS with 2% FCS and binding of the construct was detected with a murine Penta His antibody (Qiagen; diluted 1:20 in 50 μl PBS with 2% FCS). After washing, bound anti His antibodies were detected with an Fc gamma-specific antibody (Dianova) conjugated to phycoerythrin, diluted 1:100 in PBS with 2% FCS. Supernatant of untransfected cells was used as a negative control.

[0871] Flow cytometry was performed on a FACS-Calibur apparatus, the CellQuest software was used to acquire and analyze the data (Becton Dickinson biosciences, Heidelberg). FACS staining and measuring of the fluorescence intensity were performed as described in Current Protocols in Immunology (Coligan, Kruisbeek, Margulies, Shevach and Strober, Wiley-Interscience, 2002).

[0872] The bispecific binding of the single chain molecules listed above, which are specific for C-MET and cross-species specific for human and non-chimpanzee primate CD3 was clearly detectable as shown in FIG. 52. In the FACS analysis all constructs showed binding to CD3 and C-MET compared to the negative control. Cross-species specificity of the bispecific antibodies for human and macaque CD3 was demonstrated.

### 26.6 Bioactivity of C-MET and CD3 Cross-Species Specific Bispecific Single Chain Antibodies

[0873] Bioactivity of the generated bispecific single chain antibodies was analyzed by chromium 51 (⁵¹Cr) release in vitro cytotoxicity assays using the MDA-MB-231 cell line. As effector cells stimulated human CD4/CD56 depleted PBMC were used. The generation of stimulated human PBMC was described herein above in Example 11. Target cells prepared and the assay was performed in analogy to the procedure described for the MCSP×CD3 bispecific single chain antibodies in example 11.

[0874] As shown in FIG. 53 all of the generated cross-species specific bispecific single chain antibody constructs demonstrated cytotoxic activity against C-MET positive target cells elicited by stimulated human CD4/CD56 depleted PBMC.

### 26.7 Generation of Additional C-MET and CD3 Cross-Species Specific Bispecific Single Chain Molecules

[0875] The human antibody germline VH sequence VH1 1-03 (http://vbase.mrc-cpe.cam.ac.uk/) is chosen as framework context for CDRH1 (SEQ ID NO 821), CDRH2 (SEQ ID NO 822) and CDRH3 (SEQ ID NO 823). Likewise human antibody germline VH sequence VH1 1-46 (http://vbase.mrc-cpe.cam.ac.uk/) is chosen as framework context for CDRH1 (SEQ ID NO 836), CDRH2 (SEQ ID NO 837) and CDRH 3 (SEQ ID NO 838). For each human VH several degenerated oligonucleotides have to be synthesized that overlap in a terminal stretch of approximately 15-20 nucleotides. To this end every second primer is an antisense primer. For VH1 1-03 the following oligonucleotides are used:

5′CM1-VH-A-XhoI
(SEQ ID NO: 790)
CCA TGT CTC GAG TCT GGG SCT GAA STG RWG ARG CCT
GGG GCT TCA GTG AAA RTG TCC TGC ARG GCT TCG GGC
TAT ACC TTC
3′CM1-VH-B
(SEQ ID NO: 791)
AT CCA CTC AAG CCY TTG TCC AGG CSY CTG TYT AAC CCA
GTG CAA CCA GTA GCT GGT GAA GGT ATA GCC CGA AGC
5′CM1-VH-C
(SEQ ID NO: 792)
GG CTT GAG TGG ATK GGC ATG ATT GAT CCT TCC AAT AGT
GAC ACT AGG TTT AAT CCG AAC TTC AAG GAC
3′CM1-VH-D
(SEQ ID NO: 793)
GCT GCT GAG CWS CAT GTA GGC TGT GYT GGM AGA TST
GTC TMY AKT SAW TGT GRC CYT GTC CTT GAA GTT CGG
ATT
5′CM1-VH-E
(SEQ ID NO: 794)
GCC TAC ATG SWA CTC AGC AGC CTG ASA TCT GMG GAC
ACT GCA GTC TAT TAC TGT GCC ASA TAT GGT AGC TAC
GTT
3′CM1-VH-F-BstEII
(SEQ ID NO: 795)
CAT GTA GGT GAC CGA GGT TCC TTG ACC CCA GTA GTC
CAG AGG GGA AAC GTA GCT ACC ATA

[0876] For VH1 1-46 the oligonucleotides are as follows:

5′ CM3-VH-A-XhoI
(SEQ ID NO: 796)
CCA TGT CTC GAG TCT GGG RCT GAA STG RWG AAG CCT
GGG GCT TCA GTG AAG STG TCC TGC AAG GCT TCT
3′ CM3-VH-B
(SEQ ID NO: 797)
CTC AAG GCC TTG TCC AGG CSY CTG CYT CAC CCA GTG
TAT CCA GTA ACT GGT GAA GGT GTA GCC AGA AGC CTT
GCA GGA
5′ CM3-VH-C
(SEQ ID NO: 798)
CCT GGA CAA GGC CTT GAG TGG ATK GGA GAG ATT AAT
CCT AGC AGC GGT CGT ACTA AC TAC AAC GAG AAA TTC
3′ CM3-VH-D
(SEQ ID NO: 799)
C TGT GGA GGT AGA TKT GTC TMY AGT CAY TGT GAC CYT
GTT CTT GAA TTT CTC GTT GTA GTT
5′ CM3-VH-E
(SEQ ID NO: 800)
A TCT ACC TCC ACA GYC TAC ATG SAA CTC AGC ARC CTG
ASA TCT GAG GAC ACT GCG GTC TAT TAC TGT GCA
3′ CM3-VH-F-BstEII
(SEQ ID NO: 801)
CAT GTA GGT GAC CGT GGT GCC TTG GCC CCA GTA GCC
CCT WCT TGC ACA GTA ATA GAC CGC

[0877] Each of these primer sets spans over the whole corresponding VH sequence.

[0878] Within each set primers are mixed in equal amounts (e.g. 1 μl of each primer (primer stocks 20 to 100 μM) to a 20 μl PCR reaction) and added to a PCR mix consisting of PCR buffer, nucleotides and Taq polymerase. This mix is incubated at 94° C. for 3 minutes, 65° C. for 1 minute, 62° C. for 1 minute, 59° C. for 1 minute, 56° C. for 1 minute, 52° C. for 1 minute, 50° C. for 1 minute and at 72° C. for 10 minutes in a PCR cycler. Subsequently the product is run in an agarose gel electrophoresis and the product of a size from 200 to 400 isolated from the gel according to standard methods.

[0879] Each VH PCR product is then used as a template for a standard PCR reaction using primers that incorporate N-terminal and C-terminal suitable cloning restriction sites. The DNA fragment of the correct size (for a VH approximately 350 nucleotides) is isolated by agarose gel electrophoresis according to standard methods. In this way sufficient VH DNA fragment is amplified.

[0880] The human antibody germline VL sequence VklI O11 (http://vbase.mrc-cpe.cam.ac.uk/) is chosen as framework context for CDRL1 (SEQ ID NO 816), CDRL2 (SEQ ID NO 817) and CDRL3 (SEQ ID NO 818). Likewise human antibody germline VL sequence VklI A1 (http://vbase.mrc-cpe.cam.ac.uk/) is chosen as framework context for CDRL1 (SEQ ID NO 833), CDRL2 (SEQ ID NO 834) and CDRL3 (SEQ ID NO 835). For each human VL several degenerated oligonucleotides have to be synthesized that overlap in a terminal stretch of approximately 15-20 nucleotides. To this end every second primer is an antisense primer. Restriction sites needed for later cloning within the oligonucleotides are deleted. For VklI 011 the following oligonucleotides are used:

5′ CM1-VL-A-SacI
(SEQ ID NO: 802)
CCT GTA GAG CTC GTG ATG ACC CAG ACT CCA YYC TCC
CTA MCT GTG ACA SYT GGA GAG MMG GYT TCT RTC AGC
TGC AAG TCC AGT
3′ CM1-VL-B
(SEQ ID NO: 803)
GTA CCA GGC CAA GTA GTT CTT CTG ACT GCT AGT ATA
TAA AAG GGA CTG ACT GGA CTT GCA GCT GA
5′ CM1-VL-C
(SEQ ID NO: 804)
TAC TTG GCC TGG TAC CWG CAG AAA CCA GGT CAG TCT
CCT MAA CTG CTG ATT TAC TGG GCA TCC ACT AGG
3′ CM1-VL-D
(SEQ ID NO: 805)
GAG AGT GAA ATC TGT CCC AGA TCC ACT GCC TGA GAA
GCG ATC AGG GAC CCC AGA TTC CC TAGT GGA TGC CCA
GTA
5′ CM1-VL-E
(SEQ ID NO: 806)
ACA GAT TTC ACT CTC AMA ATC TCC AGW GTG RAG GCT
GAS GAC STG GSA GTT TAT TAC TGT CAG CAA TAT
3′ CM1-VL-F-BsiWI/SpeI
(SEQ ID NO: 807)
CCT CAG ACT AGT CGT ACG TTT GAT CTC CAA CTT TGT
GCC TCC ACC GAA CGT CCA CGG ATA GGC ATA ATA TTG
CTG ACA GTA ATA

[0881] For VklI A1 the oligonucleotides are as follows:

5′ CM3-VL-A-SacI
(SEQ ID NO: 808)
CCT GTA GAG CTC GTG ATG ACC CAA TCT CCA SYT TCT
TTG SCT GTG ACT CTA GGG CAG CSG GCC TCC ATC TCC
TGC
3′ CM3-VL-Ba
(SEQ ID NO: 809)
GAA CCA ACT CAT ATA ACT ACC ACC ATC ATA ATC AAC
ACT TTG GCT GGC CTT GCA GGA GAT GGA GGC
3′ CM3-VL-Bb
(SEQ ID NO: 810)
GAA CCA ACT CAT ATA ACT ACC ACC ATC ATA ATC AAC
ACT AGA TTG GCT GGC CTT GCA GGA GAT GGA GGC
5′ CM3-VL-C
(SEQ ID NO: 811)
AGT TAT ATG AGT TGG TTC CAA CAG AGA CCA GGA CAG
YCA CCC ARA CKC CTC ATC TMT GCT GCA TCC AAT CTA
3′ CM3-VL-D
(SEQ ID NO: 812)
GGT GAA GTC TGT CCC AGA GCC ACT GCC ACT AAA CCT
GKC TGG GAY CCC AGA TTC TAG ATT GGA TGC AGC
5′ CM3-VL-E
(SEQ ID NO: 813)
TCT GGG ACA GAC TTC ACC CTC AAK ATC YMT CST GTG
GAG GMG GAG GAT GTT GSA RYC TAT TACT GT CAG CAA
AGT
3′ CM3-VL-F-BsiWI/SpeI
(SEQ ID NO: 814)
CCT CAG ACT AGT CGT ACG TTT GAT CTC CAG CTT GGT
CCC CTG ACC GAA CGT GAG CGG ATC CTC ATA ACT TTG
CTG ACA GTA ATA

[0882] Each of these primer sets spans over the whole corresponding VL sequence.

[0883] Within each set primers are mixed in equal amounts (e.g. 1 μl of each primer (primer stocks 20 to 100 μM) to a 20 μl PCR reaction) and added to a PCR mix consisting of PCR buffer, nucleotides and Taq polymerase. This mix is incubated at 94° C. for 3 minutes, 65° C. for 1 minute, 62° C. for 1 minute, 59° C. for 1 minute, 56° C. for 1 minute, 52° C. for 1 minute, 50° C. for 1 minute and at 72° C. for 10 minutes in a PCR cycler. Subsequently the product is run in an agarose gel electrophoresis and the product of a size from 200 to 400 isolated from the gel according to standard methods.

[0884] Each VL PCR product is then used as a template for a standard PCR reaction using primers that incorporate N-terminal and C-terminal suitable cloning restriction sites. The DNA fragment of the correct size (for a VL approximately 330 nucleotides) is isolated by agarose gel electrophoresis according to standard methods. In this way sufficient VL DNA fragment is amplified.

[0885] The final VH1 1-03-based VH PCR product (i.e. the repertoire of human/humanized VH) is then combined with the final VklI O11-based VL PCR product (i.e. the repertoire of human/humanized VL) and the final VH1 1-46-based VH PCR product (i.e. the repertoire of human/humanized VH) with the final VklI A1-based VL PCR product (i.e. the repertoire of human/humanized VL) in the phage display vector pComb3H5Bhis to form two different libraries of functional scFvs from which—after display on filamentous phage—anti-C-MET binders are selected, screened, identified and confirmed as described in the following:

[0886] 450 ng of the light chain fragments (SacI-SpeI digested) are ligated with 1400 ng of the phagemid pComb3H5Bhis (SacI-SpeI digested; large fragment). The resulting combinatorial antibody library is then transformed into 300 μl of electrocompetent Escherichia coli XL1 Blue cells by electroporation (2.5 kV, 0.2 cm gap cuvette, 25 μFD, 200 Ohm, Biorad gene-pulser) resulting in a library size of more than 10⁷ independent clones. After one hour of phenotype expression, positive transformants are selected for carbenicilline resistance encoded by the pComb3H5BHis vector in 100 ml of liquid super broth (SB)-culture over night. Cells are then harvested by centrifugation and plasmid preparation is carried out using a commercially available plasmid preparation kit (Qiagen).

[0887] 2800 ng of this plasmid-DNA containing the VL-library (XhoI-BstEII digested; large fragment) are ligated with 900 ng of the heavy chain V-fragments (XhoI-BstEII digested) and again transformed into two 300 μl aliquots of electrocompetent E. coli XL1 Blue cells by electroporation (2.5 kV, 0.2 cm gap cuvette, 25 μFD, 200 Ohm) resulting in a total VH-VL scFv (single chain variable fragment) library size of more than 10⁷ independent clones.

[0888] After phenotype expression and slow adaptation to carbenicillin, the E. coli cells containing the antibody library are transferred into SB-carbenicillin (SB with 50 μg/mL carbenicillin) selection medium. The E. coli cells containing the antibody library are then infected with an infectious dose of 10¹² particles of helper phage VCSM13 resulting in the production and secretion of filamentous M13 phage, wherein each phage particle contains single stranded pComb3H5BHis-DNA encoding a scFv-fragment and displays the corresponding scFv-protein as a translational fusion to phage coat protein III. This pool of phages displaying the antibody library is used for the selection of antigen binding entities.

[0889] For this purpose the phage library carrying the cloned scFv-repertoire is harvested from the respective culture supernatant by PEG8000/NaCl precipitation and centrifugation. Approximately 10¹¹ to 10¹² scFv phage particles are resuspended in 0.4 ml of PBS/0.1% BSA and incubated with 10⁵ to 10⁷ C-MET transfected CHO cells (see example 26.1) for 1 hour on ice under slow agitation. These C-MET transfected CHO cells are harvested beforehand by centrifugation, washed in PBS and resuspended in PBS/1% FCS (containing Na Azide). scFv phage which do not specifically bind to the C-MET transfected CHO cells are eliminated by up to five washing steps with PBS/1% FCS (containing Na Azide). After washing, binding entities are eluted from the cells by resuspending the cells in HCl-glycine pH 2.2 (10 min incubation with subsequent vortexing) and after neutralization with 2 M Tris pH 12, the eluate is used for infection of a fresh uninfected E. coli XL1 Blue culture (OD600>0.5). The E. coli culture containing E. coli cells successfully transduced with a phagemid copy, encoding a human/humanized scFv-fragment, are again selected for carbenicillin resistance and subsequently infected with VCMS 13 helper phage to start the second round of antibody display and in vitro selection. A total of 4 to 5 rounds of selections are carried out, normally.

[0890] In order to screen for C-MET specific binders plasmid DNA corresponding to 4 and 5 rounds of panning is isolated from E. coli cultures after selection. For the production of soluble scFv-protein, VH-VL-DNA fragments are excised from the plasmids (XhoI-SpeI). These fragments are cloned via the same restriction sites into the plasmid pComb3H5BFlag/His differing from the original pComb3H5BHis in that the expression construct (e.g. scFv) includes a Flag-tag (DYKDDDDK) between the scFv and the His6-tag and the additional phage proteins are deleted. After ligation, each pool (different rounds of panning) of plasmid DNA is transformed into 100 μl heat shock competent E. coli TG1 or XLI blue and plated onto carbenicillin LB-agar. Single colonies are picked into 100 μl of LB carb (LB with 50 μg/ml carbenicillin).

[0891] E. coli transformed with pComb3H5BHis containing a VL- and VH-segment produce soluble scFv in sufficient amounts after excision of the gene III fragment and induction with 1 mM IPTG. Due to a suitable signal sequence, the scFv is exported into the periplasma where it folds into a functional conformation.

[0892] Single E. coli TG1 bacterial colonies from the transformation plates are picked for periplasmic small scale preparations and grown in SB-medium (e.g. 10 ml) supplemented with 20 mM MgCl₂ and carbenicillin 50 μg/ml (and re-dissolved in PBS (e.g. 1 ml) after harvesting. A temperature shock is applied by four rounds of freezing at −70° C. and thawing at 37° C. whereby the outer membrane of the bacteria is destroyed and the soluble periplasmic proteins including the scFvs are released into the supernatant. After elimination of intact cells and cell-debris by centrifugation, the supernatant containing the anti-C-MET scFvs is collected and used for the identification of C-MET specific binders as follows:

[0893] Binding of scFvs to C-MET is tested by flow cytometry on C-MET transfected CHO cells (see example 247.1); untransfected CHO cells are use as negative control.

[0894] For flow cytometry 2.5×10⁵ cells are incubated with 50 μl of scFv periplasmic preparation or with 5 μg/ml of purified scFv in 50 μl PBS with 2% FCS. The binding of scFv is detected with an anti-His antibody (Penta-His Antibody, BSA free, Qiagen GmbH, Hilden, FRG) at 2 μg/ml in 50 μl PBS with 2% FCS. As a second step reagent a R-Phycoerythrin-conjugated affinity purified F(ab′)2 fragment, goat anti-mouse IgG (Fc-gamma fragment specific), diluted 1:100 in 50 μl PBS with 2% FCS (Dianova, Hamburg, FRG) is used. The samples are measured on a FACSscan (BD biosciences, Heidelberg, FRG).

[0895] Single clones are then analyzed for favourable properties and amino acid sequence. C-MET specific scFvs are converted into recombinant bispecific single chain antibodies by joining them via a Gly₄Ser₁-linker with the CD3 specific scFv I2C (SEQ ID: 185) or any other CD3 specific scFv of the invention to result in constructs with the domain arrangement VH_{C-MET}-(Gly₄Ser₁)₃-VL_{C-MET}-Ser₁Gly₄Ser₁-VH_{CD3}-(Gly₄Ser₁)₃-VL_{CD3} or alternative domain arrangements. For expression in CHO cells the coding sequences of (i) an N-terminal immunoglobulin heavy chain leader comprising a start codon embedded within a Kozak consensus sequence and (ii) a C-terminal His₆-tag followed by a stop codon are both attached in frame to the nucleotide sequence encoding the bispecific single chain antibodies prior to insertion of the resulting DNA-fragment as obtained by gene synthesis into the multiple cloning site of the expression vector pEF-DHFR (Raum et al. Cancer Immunol Immunother 50 (2001) 141-150). Transfection of the generated expression plasmids, protein expression and purification of cross-species specific bispecific antibody constructs are performed as described in Examples 26.3 and 26.4. All other state of the art procedures are carried out according to standard protocols (Sambrook, Molecular Cloning; A Laboratory Manual, 3rd edition, Cold Spring Harbour Laboratory Press, Cold Spring Harbour, N.Y. (2001)).

[0896] Identification of functional bispecific single-chain antibody constructs is carried out by flow cytometric binding analysis of culture supernatant from transfected cells expressing the cross-species specific bispecific antibody constructs. Analysis is performed as described in Example 26.5 except that in addition C-MET transfected CHO cells as described in examples 26.1 and 26.2 are used.

[0897] Only those constructs showing bispecific binding to human and macaque CD3 as well as to C-MET are selected for further use.

[0898] Cytotoxic activity of the generated cross-species specific bispecific single chain antibody constructs against C-MET positive target cells elicited by effector cells is analyzed as described in Example 26.6 except that in addition C-MET transfected CHO cells as described in examples 26.1 and 26.2 are used as target cells and the macaque T cell line 4119LnPx is used as effector cells. Only those constructs showing potent recruitment of cytotoxic activity of effector cells against cells positive for C-MET are selected for further use.

### 27. Generation and Characterization of Additional cMET and CD3 Cross-Species

[0899] Specific Bispecific Single Chain Molecules 27.1 Generation of CHO Cells with Enhanced Expression of Human cMET and CHO Cells with Enhanced Expression of Macaque cMET Extracellular Domains

[0900] The modified coding sequences of human cMET and macaque cMET as described above were used for the construction of artificial cDNA sequences encoding fusion proteins of the extracellular domains of human cMET and macaque cMET, respectively, with a truncated variant of human EpCAM. To generate a construct for expression of these cMET fusion proteins cDNA fragments were obtained by gene synthesis according to standard protocols (the cDNA and amino acid sequence of the constructs is listed under SEQ ID NOs 767 and 777 for human cMET and SEQ ID NOs 788 and 789 for macaque cMET). The gene synthesis fragments were designed as to contain first a Kozak site for eukaryotic expression of the construct, followed by the coding sequence of a 19 amino acid immunoglobulin leader peptide, followed in frame by the coding sequence of the human cMET or macaque cMET protein from amino acid 1 to 908 of the mature protein corresponding to the extracellular domains of human cMET and macaque cMET, respectively, followed in frame by the coding sequence of an artificial Ser₁-Gly₄-Ser₁-Gly₁-linker, followed in frame by the coding sequence of the transmembrane domain and intracellular domain of human EpCAM (as published in GenBank; Accession number NM_{—}002354; amino acids 266 to 314 [as counted from the start codon] except for a point mutation at position 279 with isoleucine instead of valine) and a stop codon. The gene synthesis fragments were also designed as to introduce restriction sites at the beginning and at the end of the fragment. The introduced restriction sites, EcoRI at the 5′ end and SalI at the 3′ end, were utilized in the following cloning procedures. The gene synthesis fragments were cloned via EcoRI and SalI into a plasmid designated pEF-DHFR (pEF-DHFR is described in Raum et al. Cancer Immunol Immunother 50 (2001) 141-150) following standard protocols. Clones with sequence-verified nucleotide sequence were transfected into DHFR deficient CHO cells for eukaryotic expression of the constructs. Eukaryotic protein expression in DHFR deficient CHO cells was performed as described by Kaufmann R. J. (1990) Methods Enzymol. 185, 537-566. Gene amplification of the constructs was induced by increasing concentrations of methotrexate (MTX) to a final concentration of up to 20 nM MTX.

27.2 Generation of cMET and CD3 Cross-Species Specific Bispecific Single Chain Molecules

### Cloning of Cross-Species Specific Binding Molecules

[0901] Bispecific single chain antibody molecules, with a binding specificity cross-species specific for human and non-chimpanzee primate CD3epsilon as well as a binding specificity cross-species specific for human and non-chimpanzee primate cMET, were designed as set out in the following Table 10:

TABLE 10
Formats of anti-CD3 and anti-cMET cross-
species specific bispecific single chain
antibody molecules

| SEQ ID | Formats of protein constructs |
|---|---|
| (nucl/prot) | (N → C) |
| 1413/1412/ | ME86H11HLxI2CHL |
| 1427/1426/ | ME62A12HLxI2CHL |
| 1441/1440 | ME63F2HLxI2CHL |
| 1455/1454 | ME62D11HLxI2CHL |
| 1469/1468 | ME62C10HLxI2CHL |
| 1483/1482 | ME62A4HLxI2CHL |

[0902] Generation, expression and purification of these cross-species specific bispecific single chain molecules was performed as described above.

[0903] The flow cytometric binding analysis of the cMET and CD3 cross-species specific bispecific antibodies was performed as described above. The bispecific binding of the single chain molecules listed above, which are cross-species specific for cMET and cross-species specific for human and non-chimpanzee primate CD3 was clearly detectable as shown in FIG. 54. In the FACS analysis all constructs showed binding to CD3 and cMET compared to the negative control. Cross-species specificity of the bispecific antibodies to human and macaque CD3 and cMET antigens was demonstrated. Analysis of bioactivity by chromium 51 (⁵¹Cr) release in vitro cytotoxicity assays is performed as described above. Based on demonstrated cross-species specific bispecific binding and recruited cytotoxicity cross-species specific binding molecules are selected for further use.

27.3 Generation and Flow Cytometric Binding Analysis of Cross-Species Specific Single Chain Antibody Fragments (scFv) Binding to cMET

[0904] scFv cross-species specific for cMET were generated as described above and designated as set out in the following Table 11:

TABLE 11
Designation of cross-species specific
single chain antibody fragments

| SEQ ID | |
|---|---|
| (nucl/prot) | Designation |
| 1649/1648 | ME06F2HL |
| 1635/1634 | ME06E10HL |
| 1621/1620 | ME06D2HL |
| 1607/1606 | ME06D1HL |
| 1579/1578 | ME06C7HL |
| 1565/1564 | ME06C6HL |
| 1593/1592 | ME06B7HL |
| 1551/1550 | ME05F6HL |
| 1523/1522 | ME05D7HL |
| 1537/1536 | ME05B7HL |
| 1509/1508 | ME99B1HL |
| 1495/1494 | ME75H6HL |

[0905] The flow cytometric binding analysis of periplasmic preparations containing scFv cross-species specific for cMET using CHO cells expressing human cMET as described in Example 27.1 and CHO cells expressing macaque cMET as described in Example 27.1 was performed as described above. The binding of the scFv listed above, which are cross-species specific for cMET was clearly detectable as shown in FIG. 56. In the FACS analysis all constructs showed binding to cMET compared to the negative control. Cross-species specificity of the scFv antibodies to human and macaque cMET antigens was demonstrated.

[0906] Cloning of cross-species specific binding molecules based on the scFvs and expression and purification of these cross-species specific bispecific single chain molecules is performed as described above. Flow cytometric analysis of cross-species specific bispecific binding and analysis of bioactivity by chromium 51 (⁵¹Cr) release in vitro cytotoxicity assays is performed as described above. Based on demonstrated cross-species specific bispecific binding and recruited cytotoxicity cross-species specific binding molecules are selected for further use.

[0907] Human/humanized equivalents of non-human scFvs cross-species specific for cMET contained in the selected cross-species specific bispecific single chain molecules are generated as described herein. Cloning of cross-species specific binding molecules based on these human/humanized scFvs and expression and purification of these cross-species specific bispecific single chain molecules is performed as described above. Flow cytometric analysis of cross-species specific bispecific binding and analysis of bioactivity by chromium 51 (⁵¹Cr) release in vitro cytotoxicity assays is performed as described above. Based on demonstrated cross-species specific bispecific binding and recruited cytotoxicity cross-species specific binding molecules are selected for further use.

### 28. Generation and Characterization of Endosialin and CD3 Cross-Species Specific Bispecific Single Chain Antibody Molecules

### 28.1 Generation of CHO Cells Expressing Human Endosialin

[0908] The coding sequence of human Endosialin as published in GenBank (Accession number NM_{—}020404) was obtained by gene synthesis according to standard protocols. The gene synthesis fragment was designed as to contain first a Kozak site for eukaryotic expression of the construct, followed by the coding sequence of human Endosialin, followed in frame by the coding sequence of a FLAG tag and a stop codon (the cDNA and amino acid sequence of the construct is listed under SEQ ID Nos 913 and 914). The gene synthesis fragment was also designed as to introduce restriction sites at the beginning and at the end of the fragment. The introduced restriction sites, EcoRI at the 5′ end and XbaI at the 3′ end, were utilised in the following cloning procedures. The gene synthesis fragment was cloned via EcoRI and XbaI into a plasmid designated pEF-DHFR (pEF-DHFR is described in Raum et al. Cancer Immunol Immunother 50 (2001) 141-150) following standard protocols. The aforementioned procedures were carried out according to standard protocols (Sambrook, Molecular Cloning; A Laboratory Manual, 3rd edition, Cold Spring Harbour Laboratory Press, Cold Spring Harbour, N.Y. (2001)). A clone with sequence-verified nucleotide sequence was transfected into DHFR deficient CHO cells for eukaryotic expression of the construct. Eukaryotic protein expression in DHFR deficient CHO cells was performed as described by Kaufmann R. J. (1990) Methods Enzymol. 185, 537-566. Gene amplification of the construct was induced by increasing concentrations of methotrexate (MTX) to a final concentration of up to 20 nM MTX.

### 28.2 Generation of CHO Cells Expressing Macaque Endosialin

[0909] The cDNA sequence of macaque Endosialin was obtained by a set of 2 PCRs on cDNA from macaque monkey (cynomolgus) colon prepared according to standard protocols. The following reaction conditions: 1 cycle at 95° C. for 5 minutes followed by 40 cycles with 95° C. for 45 seconds, 50° C. for 45 seconds and 72° C. for 2 minutes followed by a terminal cycle of 72° C. for 5 minutes and the following primers were used for the first PCR:

forward primer:
SEQ ID NO 917
5′-atatgaattcgccaccatgctgctgcgcctgttgctggcc-3′
reverse primer:
SEQ ID NO 918
5′-gtcttcatcttcctcatcctcccc-3′

[0910] The following reaction conditions: 1 cycle at 95° C. for 5 minutes followed by 40 cycles with 95° C. for 45 seconds, 58° C. for 45 seconds and 72° C. for 2 minutes followed by a terminal cycle of 72° C. for 5 minutes and the following primers were used for the second PCR:

forward primer:
SEQ ID NO 919
5′-gtcaactacgttggtggcttcgagtg-3′
reverse primer:
SEQ ID NO 920
5′-ggtctagatcacttatcgtcatcatctttgtagtccacgctggttct
gcaggtctgc-3′

[0911] The PCR reactions were performed under addition of PCR grade betain to a final concentration of 1M. Those PCRs generated two overlapping fragments, which were isolated and sequenced according to standard protocols using the PCR primers, and thereby provided a portion of the cDNA sequence coding macaque Endosialin from codon 9 of the leader peptide to codon 733 of the mature protein. To generate a construct for expression of macaque Endosialin a cDNA fragment was obtained by gene synthesis according to standard protocols (the cDNA and amino acid sequence of the construct is listed under SEQ ID Nos 915 and 916). In this construct the coding sequence of macaque Endosialin from amino acid 9 of the leader peptide to amino acid 733 of the mature Endosialin protein, followed in frame by the coding sequence of amino acid 734 to the last amino acid of the mature human Endosialin protein, followed in frame by the coding sequence of a FLAG tag and a stop codon was fused in frame to the coding sequence of the amino acids 1 to 8 of the leader peptide of the human Endosialin protein. The gene synthesis fragment was also designed as to contain a Kozak site for eukaryotic expression of the construct and restriction sites at the beginning and the end of the fragment containing the cDNA. The introduced restriction sites, EcoRI at the 5′ end and XbaI at the 3′ end, were utilised in the following cloning procedures. The gene synthesis fragment was cloned via EcoRI and XbaI into a plasmid designated pEF-DHFR (pEF-DHFR is described in Raum et al. Cancer Immunol Immunother 50 (2001) 141-150) following standard protocols. The aforementioned procedures were carried out according to standard protocols (Sambrook, Molecular Cloning; A Laboratory Manual, 3rd edition, Cold Spring Harbour Laboratory Press, Cold Spring Harbour, N.Y. (2001)). A clone with sequence-verified nucleotide sequence was transfected into DHFR deficient CHO cells for eukaryotic expression of the construct. Eukaryotic protein expression in DHFR deficient CHO cells was performed as described by Kaufmann R. J. (1990) Methods Enzymol. 185, 537-566. Gene amplification of the construct was induced by increasing concentrations of methotrexate (MTX) to a final concentration of up to 20 nM MTX.

28.3 Cross-Species Specific Binding to Endosialin of a scFv-Antibody Fragment

[0912] The cDNA of a scFv-antibody fragment was obtained by gene synthesis according to standard protocols. The cDNA fragment was cloned via suitable restriction sites into the plasmid pComb3H5BFlag/His differing from the original pComb3H5BHis (described below) in that the expression construct (e.g. scFv) includes a Flag-tag (DYKDDDDK SEQ ID NO 933) between the scFv-fragment and the His6-tag and the additional phage proteins are deleted. After ligation, a sequence verified clone of the plasmid DNA was transformed into 100 μl heat shock competent E. coli TG1 or XLI blue and plated onto carbenicillin LB-agar. Single colonies were picked into 100 μl of LB carb (LB with 50 μg/ml carbenicillin).

[0913] After induction with 1 mM IPTG E. coli transformed with pComb3H5BFlag/His containing the coding sequence of the cross-species specific single-chain antibody produced soluble scFv in sufficient amounts. Due to a suitable signal sequence, the scFv-chain is exported into the periplasma where it folds into a functional conformation.

[0914] Single E. coli bacterial colonies from the transformation plates were picked for periplasmic small scale preparations and grown in SB-medium (e.g. 10 ml) supplemented with 20 mM MgCl₂ and carbenicillin 50 μg/ml (and re-dissolved in PBS (e.g. 1 ml) after harvesting. A temperature shock was applied by four rounds of freezing at −70° C. and thawing at 37° C. whereby the outer membrane of the bacteria is destroyed and the soluble periplasmic proteins including the scFv-molecules are released into the supernatant. After elimination of intact cells and cell-debris by centrifugation the supernatant containing the scFv-antibody fragment was collected and used in the subsequent flow cytometric binding analysis with the CHO cells transfected with human Endosialin as described in Example 28.1 and the macaque Endosialin transfectant described in Example 28.2.

[0915] To this end 200.000 cells of the respective cell lines were incubated for 30 min on ice with 50 μl of the periplasmic preparation containing the cross-species specific single-chain antibody. The cells were washed twice in PBS with 2% FCS and binding of the construct was detected with a murine Penta His antibody (Qiagen; diluted 1:20 in 50 μl PBS with 2% FCS). After washing, bound anti His antibodies were detected with an Fc gamma-specific antibody (Dianova) conjugated to phycoerythrin, diluted 1:100 in PBS with 2% FCS. Untransfected CHO cells were used as a negative control. Flow cytometry was performed on a FACS-Calibur apparatus, the CellQuest software was used to acquire and analyze the data (Becton Dickinson biosciences, Heidelberg). FACS staining and measuring of the fluorescence intensity were performed as described in Current Protocols in Immunology (Coligan, Kruisbeek, Margulies, Shevach and Strober, Wiley-Interscience, 2002).

[0916] As shown in FIG. 46, specific binding of the scFv-antibody fragment to both, human and macaque Endosialin could be demonstrated compared to the negative control.

### 28.4 Generation of Endosialin and CD3 Cross-Species Specific Bispecific Single Chain Molecules

[0917] The human antibody germline VH sequence VH1 1-03 (http://vbase.mrc-cpe.cam.ac.uk/) is chosen as framework context for CDRH1 (SEQ ID 910), CDRH2 (SEQ ID 911) and CDRH3 (SEQ ID 912). For the human VH several degenerated oligonucleotides have to be synthesized that overlap in a terminal stretch of approximately 15-20 nucleotides. To this end every second primer is an antisense primer. For VH1 1-03 the following set of oligonucleotides is used:

5′ED-VH-A-XhoI
SEQ ID NO 921
CCA GCT CTC GAG TCA GGA SCT GAG STG RWG AAG
CCT GGG GCT TCA GTG AAG RTG TCC TGC AAG GCT
TCT GGA TAC ACA TTC ACT
3′ED-VH-B
SEQ ID NO 922
AAT ATA TCC MAT CCA CTC AAG GCK CTK TCC AKK
TSY CTG CYT CAY CCA GTG TAT AAC ATA GTC AGT
GAA TGT GTA TCC AGA
5′ED-VH-C
SEQ ID NO 923
CTT GAG TGG ATK GGA TAT ATT AAT CCT TAT GAT
GAT GAT ACTA CC TAC AAC CAG AAG TTC AAG GGC
3′ED-VH-D
SEQ ID NO 924
T GAG CTS CAT GTA GGC TGT GYT GGM GGA TKT
GWC TMS AGT MAW TGT GRC CYG GCC CTT GAA CTT
CTG GTT
5′ED-VH-E
SEQ ID NO 925
C ACA GCC TAC ATG SAA CTC ARC AGC CTG ASA
TCT GAG GAC ACT GCA GTC TAT TAC TGT GCA
AGA AGG GGG
3′ED-VH-F-BstEII
SEQ ID NO 926
CCT GAT GGT GAC CAA GGT TCC TTG ACC CCA GTA
GTC CAT AGA ATA GTC GAA GTA ACC ATC ATA GGA
GTT CCC CCT TCT TGC ACA GTA

[0918] This primer set spans over the whole corresponding VH sequence.

[0919] Within the set primers are mixed in equal amounts (e.g. 1 μl of each primer (primer stocks 20 to 100 μM) to a 20 μl PCR reaction) and added to a PCR mix consisting of PCR buffer, nucleotides and Taq polymerase. This mix is incubated at 94° C. for 3 minutes, 65° C. for 1 minute, 62° C. for 1 minute, 59° C. for 1 minute, 56° C. for 1 minute, 52° C. for 1 minute, 50° C. for 1 minute and at 72° C. for 10 minutes in a PCR cycler. Subsequently the product is run in an agarose gel electrophoresis and the product of a size from 200 to 400 isolated from the gel according to standard methods.

[0920] The VH PCR product is then used as a template for a standard PCR reaction using primers that incorporate N-terminal and C-terminal suitable cloning restriction sites. The DNA fragment of the correct size (for a VH approximately 350 nucleotides) is isolated by agarose gel electrophoresis according to standard methods. In this way sufficient VH DNA fragment is amplified.

[0921] The human antibody germline VL sequence Vkl L8 (http://vbase.mrc-cpe.cam.ac.uk/) is chosen as framework context for CDRL1 (SEQ ID 907), CDRL2 (SEQ ID 908) and CDRL3 (SEQ ID 909). For the human VL several degenerated oligonucleotides have to be synthesized that overlap in a terminal stretch of approximately 15-20 nucleotides. To this end every second primer is an antisense primer. Restriction sites needed for later cloning within the oligonucleotides are deleted. For Vkl L8 the following oligonucleotides are used:

5′ED-VL-A-SacI
(SEQ ID NO 927)
CCA GTC GAG CTC CAG CTG ACC CAG TCT CMA ARM
TTC MTG TCC RCA TCA GTA GGA GAC AGA GTC NNS
ATC ACC TGC AGG GCC AG
3′ED-VL-B
(SEQ ID NO 928)
TCC TGG TTT CTG TTG ATA CCA GGC TAC AGC AGT
ACC CAC ATT CTG ACT GGC CCT GCA GGT GAT
5′ED-VL-C
(SEQ ID NO 929)
TAT CAA CAG AAA CCA GGA MAA KCC CCT AAA TTA
CTG ATT TACT CG GCA TCG AAT CGG TAC ACT GGA
GTC CCT
3′ED-VL-D
(SEQ ID NO 930)
GCT GAT GGT GAG AGT GAA MTC TGT CCC AGA TCC
ACT GCC TGA GAA GCG AYY AGG GAC TCC AGT GTA
CCG
5′ED-VL-E
(SEQ ID NO 931)
TTC ACT CTC ACC ATC AGC ART MTG CAG YCT GAA
GAC YTS GCA RMT TAT TWC TGC CAG CAA TAT ACC
AAC
3′ED-VL-F-BsiWI/SpeI
(SEQ ID NO 932)
CCT GAT ACT AGT CGT ACG TTT TAT TTC CAG CTT
GGT CCC CTG TCC AAA CGT ATA CAT GGG ATA GTT
GGT ATA TTG CTG GCA

[0922] This primer set spans over the whole corresponding VL sequence.

[0923] Within the set primers are mixed in equal amounts (e.g. 1 μl of each primer (primer stocks 20 to 100 μM) to a 20 μl PCR reaction) and added to a PCR mix consisting of PCR buffer, nucleotides and Taq polymerase. This mix is incubated at 94° C. for 3 minutes, 65° C. for 1 minute, 62° C. for 1 minute, 59° C. for 1 minute, 56° C. for 1 minute, 52° C. for 1 minute, 50° C. for 1 minute and at 72° C. for 10 minutes in a PCR cycler. Subsequently the product is run in an agarose gel electrophoresis and the product of a size from 200 to 400 isolated from the gel according to standard methods.

[0924] The VL PCR product is then used as a template for a standard PCR reaction using primers that incorporate N-terminal and C-terminal suitable cloning restriction sites. The DNA fragment of the correct size (for a VL approximately 330 nucleotides) is isolated by agarose gel electrophoresis according to standard methods. In this way sufficient VL DNA fragment is amplified.

[0925] The final VH1 1-03-based VH PCR product (i.e. the repertoire of human/humanized VH) is then combined with the final Vkl L8-based VL PCR product (i.e. the repertoire of human/humanized VL) in the phage display vector pComb3H5Bhis to form a library of functional scFvs from which—after display on filamentous phage—anti-Endosialin binders are selected, screened, identified and confirmed as described in the following: 450 ng of the light chain fragments (SacI-SpeI digested) are ligated with 1400 ng of the phagemid pComb3H5Bhis (SacI-SpeI digested; large fragment). The resulting combinatorial antibody library is then transformed into 300 μl of electrocompetent Escherichia coli XL1 Blue cells by electroporation (2.5 kV, 0.2 cm gap cuvette, 25 μFD, 200 Ohm, Biorad gene-pulser) resulting in a library size of more than 10⁷ independent clones. After one hour of phenotype expression, positive transformants are selected for carbenicillin resistance encoded by the pComb3H5BHis vector in 100 ml of liquid super broth (SB)-culture over night. Cells are then harvested by centrifugation and plasmid preparation is carried out using a commercially available plasmid preparation kit (Qiagen).

[0926] 2800 ng of this plasmid-DNA containing the VL-library (XhoI-BstEII digested; large fragment) are ligated with 900 ng of the heavy chain V-fragments (XhoI-BstEII digested) and again transformed into two 300 μl aliquots of electrocompetent E. coli XL1 Blue cells by electroporation (2.5 kV, 0.2 cm gap cuvette, 25 μFD, 200 Ohm) resulting in a total VH-VL scFv (single chain variable fragment) library size of more than 10⁷ independent clones.

[0927] After phenotype expression and slow adaptation to carbenicillin, the E. coli cells containing the antibody library are transferred into SB-carbenicillin (SB with 50 μg/mL carbenicillin) selection medium. The E. coli cells containing the antibody library are then infected with an infectious dose of 10¹² particles of helper phage VCSM13 resulting in the production and secretion of filamentous M13 phage, wherein each phage particle contains single stranded pComb3H5BHis-DNA encoding a scFv-fragment and displays the corresponding scFv-protein as a translational fusion to phage coat protein III. This pool of phages displaying the antibody library is used for the selection of antigen binding entities.

[0928] For this purpose the phage library carrying the cloned scFv-repertoire is harvested from the respective culture supernatant by PEG8000/NaCl precipitation and centrifugation. Approximately 10¹¹ to 10¹² scFv phage particles are resuspended in 0.4 ml of PBS/0.1% BSA and incubated with 10⁵ to 10⁷ Endosialin transfected CHO cells (see example 28.1) for 1 hour on ice under slow agitation. These Endosialin transfected CHO cells are harvested beforehand by centrifugation, washed in PBS and resuspended in PBS/1% FCS (containing Na Azide). scFv phage which do not specifically bind to the Endosialin transfected CHO cells are eliminated by up to five washing steps with PBS/1% FCS (containing Na Azide). After washing, binding entities are eluted from the cells by resuspending the cells in HCl-glycine pH 2.2 (10 min incubation with subsequent vortexing) and after neutralization with 2 M Tris pH 12, the eluate is used for infection of a fresh uninfected E. coli XL1 Blue culture (OD600>0.5). The E. coli culture containing E. coli cells successfully transduced with a phagemid copy, encoding a human/humanized scFv-fragment, are again selected for carbenicillin resistance and subsequently infected with VCMS 13 helper phage to start the second round of antibody display and in vitro selection. A total of 4 to 5 rounds of selections are carried out, normally.

[0929] In order to screen for Endosialin specific binders plasmid DNA corresponding to 4 and 5 rounds of panning is isolated from E. coli cultures after selection. For the production of soluble scFv-protein, VH-VL-DNA fragments are excised from the plasmids (XhoI-SpeI). These fragments are cloned via the same restriction sites into the plasmid pComb3H5BFlag/His differing from the original pComb3H5BHis in that the expression construct (e.g. scFv) includes a Flag-tag (DYKDDDDK) between the scFv and the His6-tag and the additional phage proteins are deleted. After ligation, each pool (different rounds of panning) of plasmid DNA is transformed into 100 μl heat shock competent E. coli TG1 or XLI blue and plated onto carbenicillin LB-agar. Single colonies are picked into 100 μl of LB carb (50 μg/ml).

[0930] After induction with 1 mM IPTG E. coli transformed with pComb3H5BFlag/His containing a VL- and VH-segment produce soluble scFv in sufficient amounts. Due to a suitable signal sequence, the scFv-chain is exported into the periplasma where it folds into a functional conformation.

[0931] Single E. coli TG1 bacterial colonies from the transformation plates are picked for periplasmic small scale preparations and grown in SB-medium (e.g. 10 ml) supplemented with 20 mM MgCl₂ and carbenicillin 50 μg/ml (and re-dissolved in PBS (e.g. 1 ml) after harvesting. A temperature shock is applied by four rounds of freezing at −70° C. and thawing at 37° C. whereby the outer membrane of the bacteria is destroyed and the soluble periplasmic proteins including the scFvs are released into the supernatant. After elimination of intact cells and cell-debris by centrifugation, the supernatant containing the anti-Endosialin scFvs is collected and used for the identification of Endosialin specific binders as follows:

[0932] Binding of scFvs to Endosialin is tested by flow cytometry on Endosialin transfected CHO cells (see example 28.1); untransfected CHO cells are use as negative control. For flow cytometry 2.5×10⁵ cells are incubated with 50 μl of scFv periplasmic preparation or with 5 μg/ml of purified scFv in 50 μl PBS with 2% FCS. The binding of scFv is detected with an anti-His antibody (Penta-His Antibody, BSA free, Qiagen GmbH, Hilden, FRG) at 2 μg/ml in 50 μl PBS with 2% FCS. As a second step reagent a R-Phycoerythrin-conjugated affinity purified F(ab′)2 fragment, goat anti-mouse IgG (Fc-gamma fragment specific), diluted 1:100 in 50 μl PBS with 2% FCS (Dianova, Hamburg, FRG) is used. The samples are measured on a FACSscan (BD biosciences, Heidelberg, FRG).

[0933] Single clones are then analyzed for favourable properties and amino acid sequence. Endosialin specific scFvs are converted into recombinant bispecific single chain antibodies by joining them via a Gly4Ser1-linker with the CD3 specific scFv 120 (SEQ ID NO: 185) or any other CD3 specific scFv of the invention to result in constructs with the domain arrangement VH Endosialin-(Gly4Ser1)3-VL Endosialin-Ser1Gly4Ser1-VHCD3-(Gly4Ser1)3-VLCD3 or alternative domain arrangements. For expression in CHO cells the coding sequences of (i) an N-terminal immunoglobulin heavy chain leader comprising a start codon embedded within a Kozak consensus sequence and (ii) a C-terminal His6-tag followed by a stop codon are both attached in frame to the nucleotide sequence encoding the bispecific single chain antibodies prior to insertion of the resulting DNA-fragment as obtained by gene synthesis into the multiple cloning site of the expression vector pEF-DHFR (Raum et al. Cancer Immunol Immunother 50 (2001) 141-150). A clone with sequence-verified nucleotide sequence is transfected into DHFR deficient CHO cells for eukaryotic expression of the construct. Eukaryotic protein expression in DHFR deficient CHO cells is performed as described by Kaufmann R. J. (1990) Methods Enzymol. 185, 537-566. Gene amplification of the construct is induced by increasing concentrations of methotrexate (MTX) to a final concentration of up to 20 nM MTX.

### 28.5 Expression and Purification of Bispecific Single Chain Antibody Molecules

[0934] Bispecific single chain antibody molecules are expressed in Chinese hamster ovary cells (CHO or HEK 293 cells as described herein above for the MCSP×CD3 bispecific single chain antibodies.

[0935] The isolation and analysis of the expressed bispecific single chain antibodies has also been described herein above in Example 9.

### 28.6 Flow Cytometric Binding Analysis of the Endosialin and CD3 Cross-Species Specific Bispecific Antibodies

[0936] In order to test the functionality of cross-species specific bispecific antibody constructs regarding the capability to bind to human and macaque Endosialin and CD3, respectively, a FACS analysis is performed. For this purpose CHO cells transfected with human Endosialin as described in Example 28.1 and the human CD3 positive T cell leukemia cell line HPB-ALL (DSMZ, Braunschweig, ACC483) are used to test the binding to human antigens. The binding reactivity to macaque antigens is tested by using the generated macaque Endosialin transfectant described in Example 28.2 and a macaque T cell line 4119LnPx (kindly provided by Prof Fickenscher, Hygiene Institute, Virology, Erlangen-Nuernberg; published in Knappe A, et al., and Fickenscher H., Blood 2000, 95, 3256-61). 200.000 cells of the respective cell lines are incubated for 30 min on ice with 50 μl of cell culture supernatant of transfected cells expressing the cross-species specific bispecific antibody constructs. The cells are washed twice in PBS with 2% FCS and binding of the construct is detected with a murine Penta His antibody (Qiagen; diluted 1:20 in 50 μl PBS with 2% FCS). After washing, bound anti His antibodies are detected with an Fc gamma-specific antibody (Dianova) conjugated to phycoerythrin, diluted 1:100 in PBS with 2% FCS. Supernatant of untransfected cells is used as a negative control. Flow cytometry is performed on a FACS-Calibur apparatus, the CellQuest software is used to acquire and analyze the data (Becton Dickinson biosciences, Heidelberg). FACS staining and measuring of the fluorescence intensity are performed as described in Current Protocols in Immunology (Coligan, Kruisbeek, Margulies, Shevach and Strober, Wiley-Interscience, 2002).

[0937] Only those constructs showing bispecific binding to human and macaque CD3 as well as to Endosialin are selected for further use.

### 28.7 Bioactivity of Endosialin and CD3 Cross-Species Specific Bispecific Single Chain Antibodies

[0938] Bioactivity of generated bispecific single chain antibodies is analyzed by chromium 51 (⁵¹Cr) release in vitro cytotoxicity assays using the CHO cells transfected with human Endosialin described in Example 28.1 and the CHO cells transfected with macaque Endosialin described in Example 28.2. As effector cells stimulated human CD4/CD56 depleted PBMC or the macaque T cell line 4119LnPx are used, respectively.

[0939] The generation of stimulated human PBMC was described herein above in Example 11.

[0940] Target cells prepared and the assay was performed in analogy to the procedure described for the MCSP×CD3 bispecific single chain antibodies in example 11. Only those constructs showing potent recruitment of cytotoxic activity of effector cells against cells positive for Endosialin are selected for further use.

### 29. Generation and Characterization of CD248 (Endosialin) and CD3 Cross-Species Specific Bispecific Single Chain Molecules

### 29.1 Generation of CD248 and CD3 Cross-Species Specific Bispecific Single Chain Molecules

### Cloning of Cross-Species Specific Binding Molecules

[0941] Bispecific single chain antibody molecules, with a binding specificity cross-species specific for human and non-chimpanzee primate CD3epsilon as well as a binding specificity cross-species specific for human and non-chimpanzee primate CD248, were designed as set out in the following Table 13:

TABLE 13
Formats of anti-CD3 and anti-CD248 cross-
species specific bispecific single chain
antibody molecules

| SEQ ID | Formats of protein constructs |
|---|---|
| (nucl/prot) | (N → C) |
| 1665/1664 | EN00B12HLxI2CHL |
| 1679/1678 | EN00C3HLxI2CHL |
| 1693/1692 | EN01D5HLxI2CHL |
| 1707/1706 | EN00E4HLxI2CHL |
| 1721/1720 | EN00F7HLxI2CHL |
| 1735/1734 | EN00H6HLxI2CHL |

[0942] Generation, expression and purification of these cross-species specific bispecific single chain molecules was performed as described above.

[0943] The flow cytometric binding analysis of the CD248 and CD3 cross-species specific bispecific antibodies was performed as described above. The bispecific binding of the single chain molecules listed above, which are cross-species specific for CD248 and cross-species specific for human and non-chimpanzee primate CD3 was clearly detectable as shown in FIG. 58. In the FACS analysis all constructs showed binding to CD3 and CD248 compared to the negative control. Cross-species specificity of the bispecific antibodies to human and macaque CD3 and CD248 antigens was demonstrated.

[0944] Bioactivity of the generated bispecific single chain antibodies was analyzed by chromium 51 (⁵¹Cr) release in vitro cytotoxicity assays as described above. As shown in FIG. 59 all of the generated cross-species specific bispecific single chain antibody constructs demonstrated cytotoxic activity against human CD248 positive target cells elicited by stimulated human CD4/CD56 depleted PBMC and macaque CD248 positive target cells elicited by the macaque T cell line 4119LnPx.

### 30. Generation and Characterization of EpCAM and CD3 Cross-Species Specific Bispecific Single Chain Antibody Molecules

### 30.1 Cloning and Expression of Human EpCAM Antigen on CHO Cells

[0945] The sequence of the human EpCAM antigen (‘NM_{—}002354, Homo sapiens tumor-associated calcium signal transducer 1 (TACSTD1), mRNA, National Center for Biotechnology Information, http://www.ncbi.nlm.nih.gov/entrez) was used to obtain a synthetic molecule by gene synthesis according to standard protocols. The gene synthesis fragment was also designed as to contain a Kozak site for eukaryotic expression of the construct and restriction sites at the beginning and the end of the DNA. The introduced restriction sites XbaI at the 5′ end and SalI at the 3′ end were utilised during the cloning step into the expression plasmid designated pEFDHFR as described in Raum et al. (loc cit.). After sequence verification the plasmid was used to transfect CHO/dhfr-cells as follows. A sequence verified plasmid was used to transfect CHO/dhfr-cells (ATCC No. CRL 9096; cultivated in RPMI 1640 with stabilized glutamine obtained from Biochrom AG Berlin, Germany, supplemented with 10% FCS, 1% penicillin/streptomycin all obtained from Biochrom AG Berlin, Germany and nucleosides from a stock solution of cell culture grade reagents obtained from Sigma-Aldrich Chemie GmbH, Taufkirchen, Germany, to a final concentration of 10 μg/ml Adenosine, 10 μg/ml Deoxyadenosine and 10 μg/ml Thymidine, in an incubator at 37° C., 95% humidity and 7% CO₂). Transfection was performed using the PolyFect Transfection Reagent (Qiagen GmbH, Hilden, Germany) and 5 μg of plasmid DNA according to the manufacturer's protocol. After culturing for 24 hours cells were washed once with PBS and again cultured in the aforementioned cell culture medium except that the medium was not supplemented with nucleosides and dialysed FCS (obtained from Biochrom AG Berlin, Germany) was used. Thus the cell culture medium did not contain nucleosides and thereby selection was applied on the transfected cells. Approximately 14 days after transfection the outgrowth of resistant cells was observed. After an additional 7 to 14 days the transfectants were tested positive for EpCAM-expression by FACS. Eukaryotic protein expression in DHFR deficient CHO cells was performed as described by Kaufmann R. J. (1990) Methods Enzymol. 185, 537-566. Gene amplification of the construct was induced by increasing concentrations of methothrexate (MTX) to a final concentration of up to 20 nM MTX.

### 30.2 Generation of EpCAM and CD3 Cross-Species Specific Bispecific Single Chain Molecules

[0946] Generally, bispecific single chain antibody molecules, each comprising a domain with a binding specificity for the human and the macaque CD3 antigen as well as a domain with a binding specificity for the human EPCAM antigen, were designed as set out in the following Table 14:

TABLE 14
Formats of anti-CD3 and anti-EpCAM cross-
species specific bispecific single chain
antibody molecules

| SEQ ID | Formats of protein constructs |
|---|---|
| (nucl/prot) | (N → C) |
| 945/944 | Ep 5-10 LH x I2C HL |
| 949/948 | Ep 5-10 LH x F12Q HL |
| 947/946 | Ep 5-10 LH x H2C HL |
| 961/960 | hEp 14-A1 LH x I2C HL |
| 973/972 | hEp 14-D2 LH x I2C HL |
| 985/984 | hEp 14-H8 LH x I2C HL |
| 997/996 | hEp 14-A6 LH x I2C HL |
| 1009/1008 | hEp 14-D1 LH x I2C HL |
| 1033/1032 | hEp 14-H4 LH x I2C HL |
| 1045/1044 | hEp 17-A6 LH x I2C HL |
| 1057/1056 | hEp 17-E9 LH x I2C HL |
| 1079/1078 | hEp 18-E3 LH x I2C HL |
| 1091/1090 | hEp 18-F11 LH x I2C HL |
| 1103/1102 | hEp 18-F12 LH x I2C HL |
| 1115/1114 | hEp 18-G1 LH x I2C HL |
| 1127/1126 | hEp 18-G9 LH x I2C HL |
| 1021/1020 | hEp 14-G6 LH x I2C HL |
| 1777/1776 | hEp 18-A6 LH x I2C HL |

[0947] The aforementioned constructs containing the variable light-chain (L) and variable heavy-chain (H) domains specific for human EpCAM and the CD3 specific VH and VL combinations cross-species specific for human and macaque CD3 were obtained by gene synthesis. The gene synthesis fragments were designed and eukaryotic protein expression was performed in analogy to the procedure described in example 9 for the MCSP×CD3 cross-species specific single chain molecules.

### 30.3 Expression and Purification of the Single Domain Bispecific Single Chain Antibody Molecules

[0948] The single domain bispecific single chain antibody molecules were expressed in chinese hamster ovary cells (CHO) or HEK 293 cells as described herein above for the MCSP×CD3 bispecific single chain antibodies.

[0949] The isolation and analysis of the expressed bispecific single chain antibodies has also been described herein above in Example 9.

### 30.4 Flow Cytometric Binding Analysis of the EpCAM and CD3 Cross-Species Specific Bispecific Antibodies

[0950] In order to test the functionality of the cross-species specific bispecific antibody constructs with regard to binding capability to human EpCAM and human/macaque CD3, a FACS analysis was performed. For this purpose the CHO cells transfected with human EpCAM as described in Example 30.1 and human CD3 positive T cell leukemia cell line HPB-ALL (DSMZ, Braunschweig, ACC483) were used to check the binding to human antigens. The binding reactivity to macaque CD3 was tested by using a macaque T cell line 4119LnPx (kindly provided by Prof Fickenscher, Hygiene Institute, Virology, Erlangen-Nuernberg; Knappe A, et al., and Fickenscher H: Herpesvirus saimiri-transformed macaque T cells are tolerated and do not cause lymphoma after autologous reinfusion. Blood 2000; 95:3256-61.) 200,000 cells of the respective cell population were incubated for 30 min on ice with 50 μl of the purified protein of the cross-species specific bispecific antibody constructs (e.g. 2 μg/ml) Alternatively the cell culture supernatant of transiently produced proteins was used. The cells were washed twice in PBS and binding of the construct was detected with an unlabeled murine Penta His antibody (Qiagen; diluted 1:20 in 50 μl PBS with 2% FCS). After washing, bound anti His antibodies were detected with an Fc gamma-specific antibody (Dianova) conjugated to phycoerythrin, diluted 1:100 in 50 μl PBS with 2% FCS. Fresh culture medium was used as a negative control.

[0951] Flow cytometry was performed on a FACS-Calibur apparatus, the CellQuest software was used to acquire and analyze the data (Becton Dickinson biosciences, Heidelberg). FACS staining and measuring of the fluorescence intensity were performed as described in Current Protocols in Immunology (Coligan, Kruisbeek, Margulies, Shevach and Strober, Wiley-Interscience, 2002).

[0952] The binding ability of all EpCAM-directed bispecific single chain molecules were clearly detectable as shown in FIG. 60. In the FACS analysis, all constructs showed binding to human and macaque CD3 and to human EpCAM compared to the negative control using culture medium and 1. and 2. detection antibody. In summary, the cross-species specificity of the bispecific antibody to human and macaque CD3 and human EpCAM could clearly be demonstrated.

### 30.5 Bioactivity of EpCAM and CD3 Cross-Species Specific Bispecific Single Chain Antibodies

[0953] Bioactivity of the generated bispecific single chain antibodies was analyzed by chromium 51 release in vitro cytotoxicity assays using the EpCAM positive cell line described in example 30.1. As effector cells stimulated human CD8 positive T cells or the macaque T cell line 4119LnPx were used.

[0954] Stimulated CD8+ T cells were obtained as follows:

[0955] The generation of stimulated human PBMC was described herein above in Example 11.

[0956] Target cells prepared and the assay was performed in analogy to the procedure described for the MCSP×CD3 bispecific single chain antibodies in example 11.

[0957] As shown in FIGS. 61 to 66, all of the indicated cross-species specific bispecific single chain antibody constructs revealed cytotoxic activity against human EpCAM positive target cells elicited by human CD8+ cells and against human EpCAM positive target cells elicited by the macaque T cell line 4119LnPx. As a negative control, an irrelevant bispecific single chain antibody was used.

### 30.6 Cloning and Expression of Murine EpCAM Antigen and a Human-Murine EpCAM Hybrid Antigen on CHO Cells

[0958] The sequence of the mouse EpCAM antigen (‘NM_{—}008532, Mus musculus tumor-associated calcium signal transducer 1 (Tacstd1), mRNA., National Center for Biotechnology Information, http://www.ncbi.nlm.nih.gov/entrez) was used to obtain a synthetic molecule by gene synthesis according to standard protocols. The gene synthesis fragment was also designed as to contain a Kozak site for eukaryotic expression of the construct and restriction sites at the beginning and the end of the DNA. The introduced restriction sites XbaI at the 5′ end and SalI at the 3′ end were utilised during the cloning step into the expression plasmid designated pEFDHFR. After sequence verification the plasmid was used to transfect CHO/DHFR⁻ cells as described in example 30.1. The human-murine EpCAM hybrid antigen was generated by exchanging the murine Exon 2 (amino acids no 26-61) for the human Exon 2 amino acids to enable the identification of the epitopes recognised by the cross-species specific bispecific antibody constructs. The deduced sequence was used to obtain a synthetic molecule by gene synthesis and CHO cells were transfected as described above.

### 30.7 Flow Cytometric Binding Analysis of the EpCAM and CD3 Cross-Species Specific Bispecific Antibodies to Different EpCAM Antigens

[0959] In order to analyze the binding ability of the cross-species specific bispecific antibody constructs with regard to binding abilities to different epitopes on human or murine or on a human-mouse hybrid EpCAM, a FACS flow cytometry was performed. For this purpose the CHO cells transfected with human EpCAM as described in example 1, Cho cells transfected with murine EpCAM (example 30.6) and CHO cells transfected with a human-mouse EpCAM hybrid (example 30.6) were used to check the different binding patterns. 200,000 cells of the respective cell population were incubated for 30 min on ice with 50 μl of the cell culture supernatant of transiently produced proteins. The cells were washed twice in PBS and binding of the construct was detected with an unlabeled murine Penta His antibody (Qiagen; diluted 1:20 in 50 μl PBS with 2% FCS). After washing, bound anti His antibodies were detected with an Fc gamma-specific antibody (Dianova) conjugated to phycoerythrin, diluted 1:100 in 50 μl PBS with 2% FCS. Fresh culture medium was used instead of cell culture supernatant from CHO cells transfected with the respective bispecific single chain antibody molecules as a negative control. As positive control for the expression of the murine EpCAM the detection with a rat derived unlabeled antibody specific for murine EpCAM (BD Pharmingen, #552370, Rat IgG2a,k) followed by PE labelled anti Rat IgG2a, K specific antibody (BD Pharmingen, Heidelberg, #553930) was used. Flow cytometry was performed on a FACS-Calibur apparatus, the CellQuest software was used to acquire and analyze the data (Becton Dickinson biosciences, Heidelberg). FACS staining and measuring of the fluorescence intensity were performed as described in Current Protocols in Immunology (Coligan, Kruisbeek, Margulies, Shevach and Strober, Wiley-Interscience, 2002). For the purpose of comparison the median values of the fluorescence intensity was used to generate a bar chart.

[0960] The binding ability of all EpCAM-directed bispecific single chain molecules to CHO cells transfected with human EpCAM was clearly detectable as shown in FIG. 67. None of the human EpCAM specific molecules elicited a median value significantly above the negative control when binding to murine EpCAM was analysed. The binding properties of the human EpCAM specific single chain bispecific antibody molecules to human-mouse EpCAM hybrid antigen revealed two subsets of molecules: Those without a detectable binding to the human-mouse EpCAM hybrid antigen (HD69 HL×I2C HL) and those with a median fluorescence intensity nearly at the level of the binding strength to the human EpCAM antigen (hEp 14-A1 LH×120 HL; hEp 14-H8 LH×120 HL; hEp 14-A6 LH×120 HL; hEp 14-D1 LH×120 HL; hEp 14-H4 LH×120 HL; hEp 17-A6 LH×120 HL; hEp 17-E9 LH×120 HL; hEp 18-E3 LH×120 HL; hEp 18-F11 LH×120 HL; hEp 18-F12 LH×120 HL; hEp 18-G1 LH×120 HL; hEp 18-G9 LH×120 HL; for SEQ ID NOs of the constructs see table 14). The divergent binding patterns of these two subsets of human EpCAM specific single chain bispecific antibody molecules demonstrate different epitopes on the human EpCAM antigen. Transplantation of the human EpCAM Exon 2 domain into the backbone of murine EpCAM led to gain of binding by the EpCAM-directed bispecific single chain molecules of this invention but not by the HD69 HL×I2C HL molecule. Thus, the second binding domain of the EpCAM-CD3 bispecific single chain antibody of the invention binds to an epitope localized in amino acid residues 26 to 61 of the EGF-like domain 1 of EpCAM which is encoded by Exon 2 of the EpCAM gene. Said amino acid residues 26 to 61 of the EGF-like domain 1 of human EpCAM encoded by exon 2 of the EpCAM gene are shown in SEQ ID NO. 1130.

[0961] Accordingly the epitope of the EpCAM-directed bispecific single chain molecules of this invention is mapped to the Exon 2 region of human EpCAM, while other regions of EpCAM participate in forming the epitope of the HD69 HL×I2C HL molecule. Thus, the EpCAM-directed bispecific single chain molecules of this invention form a unique own class of EpCAM-binding molecules, that is clearly differentiated from former EpCAM-binding molecules based on the EpCAM-binder HD69.

### 31. Generation and Characterization of FAP Alpha and CD3 Cross-Species Specific Bispecific Single Chain Antibody Molecules

### 31.1 Generation of CHO Cells Expressing Human FAP Alpha

[0962] The coding sequence of human FAPalpha as published in GenBank (Accession number NM_{—}004460) was obtained by gene synthesis according to standard protocols. The gene synthesis fragment was designed as to contain first a Kozak site for eukaryotic expression of the construct, followed by the coding sequence of the human FAPalpha protein and a stop codon (the cDNA and amino acid sequence of the construct is listed under SEQ ID NOs. 1149 and 1150). The gene synthesis fragment was also designed as to introduce restriction sites at the beginning and at the end of the fragment. The introduced restriction sites, XmaI at the 5′ end and SalI at the 3′ end, were utilised in the following cloning procedures. The gene synthesis fragment was cloned via XmaI and SalI into a plasmid designated pEF-DHFR (pEF-DHFR is described in Raum et al. Cancer Immunol Immunother 50 (2001) 141-150) following standard protocols. The aforementioned procedures were carried out according to standard protocols (Sambrook, Molecular Cloning; A Laboratory Manual, 3rd edition, Cold Spring Harbour Laboratory Press, Cold Spring Harbour, N.Y. (2001)). A clone with sequence-verified nucleotide sequence was transfected into DHFR deficient CHO cells for eukaryotic expression of the construct. Eukaryotic protein expression in DHFR deficient CHO cells was performed as described by Kaufmann R. J. (1990) Methods Enzymol. 185, 537-566. Gene amplification of the construct was induced by increasing concentrations of methotrexate (MTX) to a final concentration of up to 20 nM MTX.

### 31.2 Generation of CHO Cells Expressing Macaque FAP Alpha

[0963] The cDNA sequence of macaque FAP alpha (Cynomolgus) was obtained by a set of four PCRs on cDNA from macaque monkey skin prepared according to standard protocols. The following reaction conditions: 1 cycle at 94° C. for 3 minutes followed by 40 cycles with 94° C. for 0.5 minutes, 56° C. for 0.5 minutes and 72° C. for 3 minutes followed by a terminal cycle of 72° C. for 3 minutes and the following primers were used:

forward primer:
(SEQ ID NO. 1153)
5′-cagcttccaactacaaagacagac-3′
reverse primer:
(SEQ ID NO. 1154)
5′-tttcctcttcataaacccagtctgg-3′
forward primer:
(SEQ ID NO. 1155)
5′-ttgaaacaaagaccaggagatccacc-3′
reverse primer:
(SEQ ID NO. 1156)
5′-agatggcaagtaacacacttcttgc-3′
forward primer:
(SEQ ID NO. 1157)
5′-gaagaaacatctacagaattagcattgg-3′
reverse primer:
(SEQ ID NO. 1158)
5′-cacatttgaaaagaccagttccagatgc-3′
forward primer:
(SEQ ID NO. 1159)
5′-agattacagctgtcagaaaattcatagaaatgg-3′
reverse primer:
(SEQ ID NO. 1160)
5′-atataaggttttcagattctgatacaggc-3′

[0964] These PCRs generated four overlapping fragments, which were isolated and sequenced according to standard protocols using the PCR primers, and thereby provided the cDNA sequence coding macaque FAPalpha. To generate a construct for expression of macaque FAPalpha a cDNA fragment was obtained by gene synthesis according to standard protocols (the cDNA and amino acid sequence of the construct is listed under SEQ ID NOs. 1151 and 1152). This construct contains the complete coding sequence of macaque FAPalpha followed by a stop codon. The gene synthesis fragment was also designed as to contain a Kozak site for eukaryotic expression of the construct and restriction sites at the beginning and the end of the fragment containing the cDNA. The introduced restriction sites, EcoRI at the 5′ end and SalI at the 3′ end, were utilised in the following cloning procedures. The gene synthesis fragment was cloned via EcoRI and SalI into a plasmid designated pEF-DHFR (pEF-DHFR is described in Raum et al. Cancer Immunol Immunother 50 (2001) 141-150) following standard protocols. The aforementioned procedures were carried out according to standard protocols (Sambrook, Molecular Cloning; A Laboratory Manual, 3rd edition, Cold Spring Harbour Laboratory Press, Cold Spring Harbour, N.Y. (2001)). A clone with sequence-verified nucleotide sequence was transfected into DHFR deficient CHO cells for eukaryotic expression of the construct. Eukaryotic protein expression in DHFR deficient CHO cells was performed as described by Kaufmann R. J. (1990) Methods Enzymol. 185, 537-566. Gene amplification of the construct was induced by increasing concentrations of methotrexate (MTX) to a final concentration of up to 20 nM MTX.

### 31.3 Generation of FAP Alpha and CD3 Cross-Species Specific Bispecific Single Chain Molecules

### Cloning of Cross-Species Specific Binding Molecules

[0965] Generally, bispecific single chain antibody molecules, each comprising a domain with a binding specificity cross-species specific for human and non-chimpanzee primate CD3 epsilon as well as a domain with a binding specificity cross-species specific for human and non-chimpanzee primate FAP alpha, were designed as set out in the following Table 15:

TABLE 15
Formats of anti-CD3 and anti-FAP alpha
cross-species specific bispecific
single chain antibody molecules

| SEQ ID NO. | Formats of protein constructs |
|---|---|
| (nucl/prot) | (N → C) |
| 1144/1143 | FAPA-1 LH x I2C HL |
| 1148/1147 | FAPA-1 LH x F12Q HL |
| 1146/1145 | FAPA-1 LH x H2C HL |

[0966] The aforementioned constructs containing the variable light-chain (L) and variable heavy-chain (H) domains cross-species specific for human and macaque FAP alpha and the CD3 specific VH and VL combinations cross-species specific for human and macaque CD3 were obtained by gene synthesis. The gene synthesis fragments were designed and eukaryotic protein expression was performed in analogy to the procedure described in example 9 for the MCSP×CD3 cross-species specific single chain molecules.

### 31.4 Expression and Purification of the Bispecific Single Chain Antibody Molecules

[0967] The bispecific single chain antibody molecules were expressed in Chinese hamster ovary cells (CHO) or HEK 293 cells as described herein above for the MCSP×CD3 bispecific single chain antibodies.

[0968] The isolation and analysis of the expressed bispecific single chain antibodies has also been described herein above in Example 9.

### 31.5 Flow Cytometric Binding Analysis of the FAP Alpha and CD3 Cross-Species Specific Bispecific Antibodies

[0969] In order to test the functionality of the cross-species specific bispecific antibody constructs regarding the capability to bind to human and macaque FAPalpha and CD3, respectively, a FACS analysis was performed. For this purpose CHO cells transfected with human FAPalpha as described in Example 31.1 and the human CD3 positive T cell leukemia cell line HPB-ALL (DSMZ, Braunschweig, ACC483) were used to test the binding to human antigens. The binding reactivity to macaque antigens was tested by using the generated macaque FAPalpha transfectant described in Example 31.2 and a macaque T cell line 4119LnPx (kindly provided by Prof Fickenscher, Hygiene Institute, Virology, Erlangen-Nuernberg; published in Knappe A, et al., and Fickenscher H., Blood 2000, 95, 3256-61). 200.000 cells of the respective cell lines were incubated for 30 min on ice with 50 μl of cell culture supernatant of transfected cells expressing the cross-species specific bispecific antibody constructs. The cells were washed twice in PBS with 2% FCS and binding of the construct was detected with a murine Penta His antibody (Qiagen; diluted 1:100 in 50 μl PBS with 2% FCS). After washing, bound anti His antibodies were detected with an Fc gamma-specific antibody (Dianova) conjugated to phycoerythrin, diluted 1:100 in PBS with 2% FCS. Supernatant of untransfected cells was used as a negative control.

[0970] Flow cytometry was performed on a FACS-Calibur apparatus, the CellQuest software was used to acquire and analyze the data (Becton Dickinson biosciences, Heidelberg). FACS staining and measuring of the fluorescence intensity were performed as described in Current Protocols in Immunology (Coligan, Kruisbeek, Margulies, Shevach and Strober, Wiley-Interscience, 2002).

[0971] The bispecific binding of the single chain molecules listed above, which are cross-species specific for FAPalpha and cross-species specific for human and non-chimpanzee primate CD3 was clearly detectable as shown in FIG. 68. In the FACS analysis all constructs showed binding to CD3 and FAPalpha compared to the negative control. Cross-species specificity of the bispecific antibodies to human and macaque CD3 and FAPalpha antigens was demonstrated.

### 31.6 Bioactivity of FAPalpha and CD3 Cross-Species Specific Bispecific Single Chain Antibodies

[0972] Bioactivity of the generated bispecific single chain antibodies was analyzed by chromium 51 (⁵¹Cr) release in vitro cytotoxicity assays using the CHO cells transfected with human FAPalpha described in Example 31.1 and the CHO cells transfected with macaque FAPalpha described in Example 31.2. As effector cells stimulated human CD4/CD56 depleted PBMC or the macaque T cell line 4119LnPx were used, respectively.

[0973] The generation of stimulated human PBMC was described herein above in Example 11.

[0974] Target cells prepared and the assay was performed in analogy to the procedure described for the MCSP×CD3 bispecific single chain antibodies in example 11. As shown in FIG. 69 all of the generated cross-species specific bispecific single chain antibody constructs demonstrated cytotoxic activity against human FAPalpha positive target cells elicited by stimulated human CD4/CD56 depleted PBMC and macaque FAPalpha positive target cells elicited by the macaque T cell line 4119LnPx.

31.7 Generation of Additional FAP alpha and CD3 Cross-Species Specific Bispecific Single Chain Antibody Molecules

[0975] The human antibody germline VH sequence VH1 1-03 (http://vbase.mrc-cpe.cam.ac.uk/) is chosen as framework context for CDRH1 (SEQ ID NO. 1137), CDRH2 (SEQ ID NO. 1138) and CDRH3 (SEQ ID NO. 1139). For the human VH several degenerated oligonucleotides have to be synthesized that overlap in a terminal stretch of approximately 15-20 nucleotides. To this end every second primer is an antisense primer. For VH1 1-03 the following oligonucleotides are used:

5′FAP-VH-A-XhoI
(SEQ ID NO. 1161)
CCG CTA CTC GAG TCT GGA SCT GAG STG RWG AAG
CCT GGG GCT TCA GTA AAG
3′FAP-VH-B
(SEQ ID NO. 1162)
CTG TCT CAC CCA GTG TAT GGT GTA TTC AGT GAA
TGT GTA TCY AGA AGY CTT GCA GGA CAY CTT TAC
TGA AGC CCC
5′FAP-VH-C
(SEQ ID NO. 1163)
CAC TGG GTG AGA CAG KCC CMT GGA MAG AGM CTT
GAG TGG ATK GGA GGT ATT AAT CCT AAC AAT GGT
ATT CCT AAC TAC
3′FAP-VH-D
(SEQ ID NO. 1164)
CAT GTA GGC GGT GCT GGM GGA CKT GYC TMY AGT
TAW TGT GRC CCT GCC CTT GAA CTT CTG ATT GTA
GTT AGG AAT ACC
5′FAP-VH-E
(SEQ ID NO. 1165)
AGC ACC GCC TAC ATG GAG CTC MGC AGC CTG ASA
TCT GAG GAT ACT GCG GTC TAT TWC TGT GCA AGA
AGA AGA ATC GCC
3′FAP-VH-F-BstEII
(SEQ ID NO. 1166)
CCA GTA GGT GAC CAG GGT TCC TTG ACC CCA GTA
GTC CAT AGC ATG GCC CTC GTC GTA ACC ATA GGC
GAT TCT TCT TCT TGC ACA

[0976] This primer set spans over the whole corresponding VH sequence.

[0977] Within the set primers are mixed in equal amounts (e.g. 1 μl of each primer (primer stocks 20 to 100 μM) to a 20 μl PCR reaction) and added to a PCR mix consisting of PCR buffer, nucleotides and Taq polymerase. This mix is incubated at 94° C. for 3 minutes, 65° C. for 1 minute, 62° C. for 1 minute, 59° C. for 1 minute, 56° C. for 1 minute, 52° C. for 1 minute, 50° C. for 1 minute and at 72° C. for 10 minutes in a PCR cycler. Subsequently the product is run in an agarose gel electrophoresis and the product of a size from 200 to 400 isolated from the gel according to standard methods.

[0978] The VH PCR product is then used as a template for a standard PCR reaction using primers that incorporate N-terminal and C-terminal suitable cloning restriction sites. The DNA fragment of the correct size (for a VH approximately 350 nucleotides) is isolated by agarose gel electrophoresis according to standard methods. In this way sufficient VH DNA fragment is amplified.

[0979] The human antibody germline VL sequence VklI O11 (http://vbase.mrc-cpe.cam.ac.uk/) is chosen as framework context for CDRL1 (SEQ ID NO. 1132), CDRL2 (SEQ ID NO. 1133) and CDRL3 (SEQ ID NO. 1134). For this human VL several degenerated oligonucleotides have to be synthesized that overlap in a terminal stretch of approximately 15-20 nucleotides. To this end every second primer is an antisense primer. Restriction sites needed for later cloning within the oligonucleotides are deleted. For VklI O11 the following oligonucleotides are used:

5′FAP-VL-A-SacI
(SEQ ID NO. 1167)
CGA CCT GAG CTC GTG ATG ACA CAG ACT CCA YYC
TCC CTA SCT GTG ACA SYT GGA GAG MMG GYT TCT
ATS AGC TGC AAG TCC AGT CAG
3′FAP-VL-B
(SEQ ID NO. 1168)
AGA CTG CCC TGG CTT CTG CWG GWA CCA GGC CAA
GTA GTT CTT TTG ATT ACG ACT ATA TAA AAG GCT
CTG ACT GGA CTT GCA GCT
5′FAP-VL-C
(SEQ ID NO. 1169)
CAG AAG CCA GGG CAG TCT CCT MAA CTG CTG ATT
TWC TGG GCA TCC ACTA GG GAA TCT GGG GTC CCT
GAT CGC TTC TCA GGC AGT GGA
3′FAP-VL-D
(SEQ ID NO. 1170)
ATA TTG CTG ACA GTM ATA AAC TSC CAS GTC CTC
AGC CTS CAC WCT GCT GAT CKT GAG AKT GAA ATC
CGT CCC ARA TCC ACT GCC TGA GAA
3′FAP-VL-E-BsiWI/SpeI
(SEQ ID NO. 1171)
CCA GTA ACT AGT CGT ACG TTT GAT CTC CAC CTT
GGT CCC ACC ACC GAA CGT GAG CGG ATA GCT AAA
ATA TTG CTG ACA GT

[0980] This primer set spans over the whole corresponding VL sequence.

[0981] Within the set primers are mixed in equal amounts (e.g. 1 μl of each primer (primer stocks 20 to 100 μM) to a 20 μl PCR reaction) and added to a PCR mix consisting of PCR buffer, nucleotides and Taq polymerase. This mix is incubated at 94° C. for 3 minutes, 65° C. for 1 minute, 62° C. for 1 minute, 59° C. for 1 minute, 56° C. for 1 minute, 52° C. for 1 minute, 50° C. for 1 minute and at 72° C. for 10 minutes in a PCR cycler. Subsequently the product is run in an agarose gel electrophoresis and the product of a size from 200 to 400 isolated from the gel according to standard methods.

[0982] The VL PCR product is then used as a template for a standard PCR reaction using primers that incorporate N-terminal and C-terminal suitable cloning restriction sites. The DNA fragment of the correct size (for a VL approximately 330 nucleotides) is isolated by agarose gel electrophoresis according to standard methods. In this way sufficient VL DNA fragment is amplified.

[0983] The final VH1 1-03-based VH PCR product (i.e. the repertoire of human/humanized VH) is then combined with the final VklI O11-based VL PCR product (i.e. the repertoire of human/humanized VL) in the phage display vector pComb3H5Bhis to form a library of functional scFvs from which—after display on filamentous phage—anti-FAPalpha binders are selected, screened, identified and confirmed as described in the following:

[0984] 450 ng of the light chain fragments (SacI-SpeI digested) are ligated with 1400 ng of the phagemid pComb3H5Bhis (SacI-SpeI digested; large fragment). The resulting combinatorial antibody library is then transformed into 300 μl of electrocompetent Escherichia coli XL1 Blue cells by electroporation (2.5 kV, 0.2 cm gap cuvette, 25 μFD, 200 Ohm, Biorad gene-pulser) resulting in a library size of more than 10⁷ independent clones. After one hour of phenotype expression, positive transformants are selected for carbenicillin resistance encoded by the pComb3H5BHis vector in 100 ml of liquid super broth (SB)-culture over night. Cells are then harvested by centrifugation and plasmid preparation is carried out using a commercially available plasmid preparation kit (Qiagen).

[0985] 2800 ng of this plasmid-DNA containing the VL-library (XhoI-BstEII digested; large fragment) are ligated with 900 ng of the heavy chain V-fragments (XhoI-BstEII digested) and again transformed into two 300 μl aliquots of electrocompetent E. coli XL1 Blue cells by electroporation (2.5 kV, 0.2 cm gap cuvette, 25 μFD, 200 Ohm) resulting in a total VH-VL scFv (single chain variable fragment) library size of more than 10⁷ independent clones.

[0986] After phenotype expression and slow adaptation to carbenicillin, the E. coli cells containing the antibody library are transferred into SB-carbenicillin (SB with 50 μg/mL carbenicillin) selection medium. The E. coli cells containing the antibody library are then infected with an infectious dose of 10¹² particles of helper phage VCSM13 resulting in the production and secretion of filamentous M13 phage, wherein each phage particle contains single stranded pComb3H5BHis-DNA encoding a scFv-fragment and displays the corresponding scFv-protein as a translational fusion to phage coat protein III. This pool of phages displaying the antibody library is used for the selection of antigen binding entities.

[0987] For this purpose the phage library carrying the cloned scFv-repertoire is harvested from the respective culture supernatant by PEG8000/NaCl precipitation and centrifugation. Approximately 10¹¹ to 10¹² scFv phage particles are resuspended in 0.4 ml of PBS/0.1% BSA and incubated with 10⁵ to 10⁷ FAPalpha transfected CHO cells (see example 31.1) for 1 hour on ice under slow agitation. These FAPalpha transfected CHO cells are harvested beforehand by centrifugation, washed in PBS and resuspended in PBS/1% FCS (containing 0.05% Na Azide). scFv phage which do not specifically bind to the FAPalpha transfected CHO cells are eliminated by up to five washing steps with PBS/1% FCS (containing 0.05% Na Azide). After washing, binding entities are eluted from the cells by resuspending the cells in HCl-glycine pH 2.2 (10 min incubation with subsequent vortexing) and after neutralization with 2 M Tris pH 12, the eluate is used for infection of a fresh uninfected E. coli XL1 Blue culture (OD600>0.5). The E. coli culture containing E. coli cells successfully transduced with a phagemid copy, encoding a human/humanized scFv-fragment, are again selected for carbenicillin resistance and subsequently infected with VCMS 13 helper phage to start the second round of antibody display and in vitro selection. Typically a total of 4 to 5 rounds of selections are carried out.

[0988] In order to screen for FAPalpha specific binders plasmid DNA corresponding to 4 and 5 rounds of panning is isolated from E. coli cultures after selection. For the production of soluble scFv-protein, VH-VL-DNA fragments are excised from the plasmids (XhoI-SpeI). These fragments are cloned via the same restriction sites into the plasmid pComb3H5BFlag/His differing from the original pComb3H5BHis in that the expression construct (e.g. scFv) includes a Flag-tag (DYKDDDDK) between the scFv and the His6-tag and the additional phage proteins are deleted. After ligation, each pool (different rounds of panning) of plasmid DNA is transformed into 100 μl heat shock competent E. coli TG1 or XLI blue and plated onto carbenicillin LB-agar. Single colonies are picked into 100 μl of LB carb (LB with 50 μg/ml carbenicillin).

[0989] E. coli transformed with pComb3H5BFlag/His containing a VL- and VH-segment produce soluble scFv in sufficient amounts after induction with 1 mM IPTG. Due to a suitable signal sequence, the scFv is exported into the periplasma where it folds into a functional conformation.

[0990] Single E. coli bacterial colonies from the transformation plates are picked for periplasmic small scale preparations and grown in SB-medium (e.g. 10 ml) supplemented with 20 mM MgCl₂ and carbenicillin 50 μg/ml (and re-dissolved in PBS (e.g. 1 ml) after harvesting. A temperature shock is applied by four rounds of freezing at −70° C. and thawing at 37° C. whereby the outer membrane of the bacteria is destroyed and the soluble periplasmic proteins including the scFvs are released into the supernatant. After elimination of intact cells and cell-debris by centrifugation, the supernatant containing the anti-FAPalpha scFvs is collected and used for the identification of FAPalpha specific binders as follows:

[0991] Binding of scFvs to FAPalpha is tested by flow cytometry on FAPalpha transfected CHO cells (see example 31.1); untransfected CHO cells are use as negative control. For flow cytometry 2.5×10⁵ cells are incubated with 50 μl of scFv periplasmic preparation or with 5 μg/ml of purified scFv in 50 μl PBS with 2% FCS. The binding of scFv is detected with an anti-His antibody (Penta-His Antibody, BSA free, Qiagen GmbH, Hilden, FRG) at 2 μg/ml in 50 μl PBS with 2% FCS. As a second step reagent a R-Phycoerythrin-conjugated affinity purified F(ab′)2 fragment, goat anti-mouse IgG (Fc-gamma fragment specific), diluted 1:100 in 50 μl PBS with 2% FCS (Dianova, Hamburg, FRG) is used. The samples are measured on a FACSscan (BD biosciences, Heidelberg, FRG).

[0992] Single clones are then analyzed for favorable properties and amino acid sequence. FAPalpha specific scFvs are converted into recombinant bispecific single chain antibodies by joining them via a Gly₄Ser₁-linker with the CD3 specific scFv I2C (SEQ ID NO. 185) or any other CD3 specific scFv of the invention to result in constructs with the domain arrangement VL_{FAPalpha}-(Gly₄Ser₁)₃-VH_{FAPalpha}-Ser₁Gly₄Ser₁-VH_{CD3}-(Gly₄Ser₁)₃-VL_{CD3} or alternative domain arrangements. For expression in CHO cells the coding sequences of (i) an N-terminal immunoglobulin heavy chain leader comprising a start codon embedded within a Kozak consensus sequence and (ii) a C-terminal His₆-tag followed by a stop codon are both attached in frame to the nucleotide sequence encoding the bispecific single chain antibodies prior to insertion of the resulting DNA-fragment as obtained by gene synthesis into the multiple cloning site of the expression vector pEF-DHFR (Raum et al. Cancer Immunol Immunother 50 (2001) 141-150). Transfection of the generated expression plasmids, protein expression and purification of cross-species specific bispecific antibody constructs are performed as described in Examples 31.3 and 31.4. All other state of the art procedures are carried out according to standard protocols (Sambrook, Molecular Cloning; A Laboratory Manual, 3rd edition, Cold Spring Harbour Laboratory Press, Cold Spring Harbour, N.Y. (2001)).

[0993] Identification of functional bispecific single-chain antibody constructs is carried out by flow cytometric binding analysis of culture supernatant from transfected cells expressing the cross-species specific bispecific antibody constructs. Analysis is performed as described in Example 31.5. Only those constructs showing bispecific binding to human and macaque CD3 as well as to FAPalpha are selected for further use.

[0994] Cytotoxic activity of the generated cross-species specific bispecific single chain antibody constructs against FAPalpha positive target cells elicited by effector cells is analyzed as described in Example 31.6. Only those constructs showing potent recruitment of cytotoxic activity of effector cells against cells positive for FAPalpha are selected for further use.

### 32. Generation and Characterization of Additional FAPalpha and CD3 Cross-Species Specific Bispecific Single Chain Molecules

### 32.1 Generation of FAPalpha and CD3 Cross-Species Specific Bispecific Single Chain Molecules

### Cloning of Cross-Species Specific Binding Molecules

[0995] Bispecific single chain antibody molecules, with a binding specificity cross-species specific for human and non-chimpanzee primate CD3epsilon as well as a binding specificity cross-species specific for human and non-chimpanzee primate FAPalpha, were designed as set out in the following Table 16:

TABLE 16
Formats of anti-CD3 and anti-FAPalpha
cross-species specific bispecific
single chain antibody molecules

| SEQ ID | Formats of protein constructs |
|---|---|
| (nucl/prot) | (N → C) |
| 1861/1860 | FA19D12HLxI2CHL |
| 1847/1846 | FA20H3HLxI2CHL |
| 1791/1790 | FA22A9HLxI2CHL |
| 1805/1804 | FA22C11HLxI2CHL |
| 1875/1874 | FA19D9HLxI2CHL |
| 1819/1818 | FA22D8HLxI2CHL |
| 1833/1832 | FA22E8HLxI2CHL |

[0996] Generation, expression and purification of these cross-species specific bispecific single chain molecules was performed as described above.

[0997] The flow cytometric binding analysis of the FAPalpha and CD3 cross-species specific bispecific antibodies was performed as described above. The bispecific binding of the single chain molecules listed above, which are cross-species specific for FAPalpha and cross-species specific for human and non-chimpanzee primate CD3 was clearly detectable as shown in FIG. 70. In the FACS analysis all constructs showed binding to CD3 and FAPalpha compared to the negative control. Cross-species specificity of the bispecific antibodies to human and macaque CD3 and FAPalpha antigens was demonstrated.

[0998] Bioactivity of the generated bispecific single chain antibodies was analyzed by chromium 51 (⁵¹Cr) release in vitro cytotoxicity assays as described above. As shown in FIG. 71 all of the generated cross-species specific bispecific single chain antibody constructs demonstrated cytotoxic activity against human FAPalpha positive target cells elicited by stimulated human CD4/CD56 depleted PBMC and macaque FAPalpha positive target cells elicited by the macaque T cell line 4119LnPx.

32.2 Generation and Flow Cytometric Binding Analysis of Cross-Species Specific Single Chain Antibody Fragments (scFv) Binding to FAPalpha

[0999] scFv cross-species specific for FAPalpha were generated as described above and designated as set out in the following Table 17:

TABLE 17
Designation of cross-species specific
single chain antibody fragments

| SEQ ID | |
|---|---|
| (nucl/prot) | Designation |
| 1901/1900 | 86C12HL |
| 1887/1886 | 87G9HL |
| 1971/1970 | 86F12HL |
| 1957/1956 | 86F10HL |
| 1985/1984 | 86F2HL |
| 1943/1942 | 86E5HL |
| 1929/1928 | 86D6HL |
| 1915/1914 | 86D2HL |

[1000] The flow cytometric binding analysis of periplasmic preparations containing scFv cross-species specific for FAPalpha using CHO cells transfected with human FAPalpha and CHO cells transfected with macaque FAPalpha was performed as described above. The binding of the scFv listed above, which are cross-species specific for FAPalpha was clearly detectable as shown in FIG. 72. In the FACS analysis all constructs showed binding to FAPalpha compared to the negative control. Cross-species specificity of the scFv antibodies to human and macaque FAPalpha antigens was demonstrated.

[1001] Cloning of cross-species specific binding molecules based on the scFvs and expression and purification of these cross-species specific bispecific single chain molecules is performed as described above. Flow cytometric analysis of cross-species specific bispecific binding and analysis of bioactivity by chromium 51 (⁵¹Cr) release in vitro cytotoxicity assays is performed as described above. Based on demonstrated cross-species specific bispecific binding and recruited cytotoxicity cross-species specific binding molecules are selected for further use.

[1002] Human/humanized equivalents of non-human scFvs cross-species specific for FAPalpha contained in the selected cross-species specific bispecific single chain molecules are generated as described herein. Cloning of cross-species specific binding molecules based on these human/humanized scFvs and expression and purification of these cross-species specific bispecific single chain molecules is performed as described above. Flow cytometric analysis of cross-species specific bispecific binding and analysis of bioactivity by chromium 51 (⁵¹Cr) release in vitro cytotoxicity assays is performed as described above. Based on demonstrated cross-species specific bispecific binding and recruited cytotoxicity cross-species specific binding molecules are selected for further use.

### 33. Generation and Characterization of IGF-1R and CD3 Cross-Species Specific Bispecific Single Chain Molecules

### 33.1 Generation of CHO Cells Expressing Human IGF-1R

[1003] The coding sequence of human IGF-1R as published in GenBank (Accession number NM_{—}000875) was obtained by gene synthesis according to standard protocols. The gene synthesis fragment was designed as to contain first a Kozak site for eukaryotic expression of the construct followed by the coding sequence of the human IGF-1R protein and a stop codon (the cDNA and amino acid sequence of the construct is listed under SEQ ID Nos 2011 and 2012). The gene synthesis fragment was also designed as to introduce restriction sites at the beginning and at the end of the fragment. The introduced restriction sites, EcoRI at the 5′ end and SalI at the 3′ end, were utilized in the following cloning procedures. Undesirable internal restriction sites were removed by silent mutation of the coding sequence in the gene synthesis fragment. The gene synthesis fragment was cloned via EcoRI and SalI into a plasmid designated pEF-DHFR (pEF-DHFR is described in Raum et al. Cancer Immunol Immunother 50 (2001) 141-150) following standard protocols. The aforementioned procedures were carried out according to standard protocols (Sambrook, Molecular Cloning; A Laboratory Manual, 3rd edition, Cold Spring Harbour Laboratory Press, Cold Spring Harbour, N.Y. (2001)). A clone with sequence-verified nucleotide sequence was transfected into DHFR deficient CHO cells for eukaryotic expression of the construct. Eukaryotic protein expression in DHFR deficient CHO cells was performed as described by Kaufmann R. J. (1990) Methods Enzymol. 185, 537-566. Gene amplification of the construct was induced by increasing concentrations of methotrexate (MTX) to a final concentration of up to 20 nM MTX.

### 33.2 Generation of CHO Cells Expressing Macaque IGF-1R

[1004] The coding sequence of macaque IGF-1R as published in GenBank (Accession number XM_{—}001100407) was obtained by gene synthesis according to standard protocols. The gene synthesis fragment was designed as to contain first a Kozak site for eukaryotic expression of the construct followed by the coding sequence of the macaque IGF-1R protein and a stop codon (the cDNA and amino acid sequence of the construct is listed under SEQ ID Nos 2013 and 2014). The gene synthesis fragment was also designed as to introduce restriction sites at the beginning and at the end of the fragment. The introduced restriction sites, EcoRI at the 5′ end and SalI at the 3′ end, were utilized in the following cloning procedures. Undesirable internal restriction sites were removed by silent mutation of the coding sequence in the gene synthesis fragment. The gene synthesis fragment was cloned via EcoRI and SalI into a plasmid designated pEF-DHFR (pEF-DHFR was described in Raum et al. Cancer Immunol Immunother 50 (2001) 141-150) following standard protocols. The aforementioned procedures were carried out according to standard protocols (Sambrook, Molecular Cloning; A Laboratory Manual, 3rd edition, Cold Spring Harbour Laboratory Press, Cold Spring Harbour, N.Y. (2001)). A clone with sequence-verified nucleotide sequence was transfected into DHFR deficient CHO cells for eukaryotic expression of the construct. Eukaryotic protein expression in DHFR deficient CHO cells was performed as described by Kaufmann R. J. (1990) Methods Enzymol. 185, 537-566. Gene amplification of the construct was induced by increasing concentrations of methotrexate (MTX) to a final concentration of up to 20 nM MTX.

### 33.3 Generation of IGF-1R and CD3 Cross-Species Specific Bispecific Single Chain Molecules

### Cloning of Cross-Species Specific Binding Molecules

[1005] Generally, bispecific single chain antibody molecules, each comprising a domain with a binding specificity cross-species specific for human and non-chimpanzee primate CD3epsilon as well as a domain with a binding specificity cross-species specific for human and non-chimpanzee primate IGF-1R, were designed as set out in the following Table 18:

TABLE 18
Formats of anti-CD3 and anti-IGF-1R
cross-species specific bispecific
single chain antibody molecules

| SEQ ID | Formats of protein constructs |
|---|---|
| (nucl/prot) | (N → C) |
| 2028/2027 | IGF1R2HLxI2CHL |
| 2042/2041 | IGF1R7HLxI2CHL |
| 2056/2055 | IGF1R9HLxI2CHL |
| 2070/2069 | IGF1R10HLxI2CHL |
| 2084/2083 | IGF1R11HLxI2CHL |
| 2098/2097 | IGF1R12HLxI2CHL |
| 2112/2111 | IGF1R13HLxI2CHL |
| 2126/2125 | IGF1R15HLxI2CHL |
| 2140/2139 | IGF1R16HLxI2CHL |
| 2154/2153 | IGF1R17HLxI2CHL |
| 2168/2167 | IGF1R19HLxI2CHL |
| 2182/2181 | IGF1R20HLxI2CHL |
| 2196/2195 | IGF1R21HLxI2CHL |
| 2210/2209 | IGF1R23HLxI2CHL |
| 2224/2223 | IGF1R24HLxI2CHL |

[1006] Generation, expression and purification of these cross-species specific bispecific single chain molecules was performed as described above.

[1007] The flow cytometric binding analysis of the IGF-1R and CD3 cross-species specific bispecific antibodies was performed as described above. The bispecific binding of the single chain molecules listed above, which are cross-species specific for IGF-1R and cross-species specific for human and non-chimpanzee primate CD3 was clearly detectable as shown in FIG. 73. In the FACS analysis all constructs showed binding to CD3 and IGF-1R compared to the negative control. Cross-species specificity of the bispecific antibodies to human and macaque CD3 and IGF-1R antigens was demonstrated.

[1008] Bioactivity of the generated bispecific single chain antibodies was analyzed by chromium 51 (⁵¹Cr) release in vitro cytotoxicity assays as described above. All the cross-species specific bispecific single chain antibody constructs shown in FIG. 74 demonstrated cytotoxic activity against human IGF-1R positive target cells elicited by stimulated human CD4/CD56 depleted PBMC and macaque IGF-1R positive target cells elicited by the macaque T cell line 4119LnPx.

[1009] Human/humanized equivalents of non-human scFvs cross-species specific for IGF-1R contained in the cross-species specific bispecific single chain molecules are generated as described herein. Cloning of cross-species specific binding molecules based on these human/humanized scFvs and expression and purification of these cross-species specific bispecific single chain molecules is performed as described above. Flow cytometric analysis of cross-species specific bispecific binding and analysis of bioactivity by chromium 51 (⁵¹Cr) release in vitro cytotoxicity assays is performed as described above. Based on demonstrated cross-species specific bispecific binding and recruited cytotoxicity cross-species specific binding molecules are selected for further use.

Lengthy table referenced here
US20120034228A1-20120209-T00001
Please refer to the end of the specification for access instructions.

LENGTHY TABLES
The patent application contains a lengthy table section. A copy of the table is available in electronic form from the USPTO web site (http://seqdata.uspto.gov/?pageRequest=docDetail&DocID=US20120034228A1). An electronic copy of the table will also be available from the USPTO upon request and payment of the fee set forth in 37 CFR 1.19(b)(3).

1. A bispecific single chain antibody molecule comprising a first binding domain which is an antigen-interaction site, capable of binding to an epitope of human and Callithrix jacchus, Saguinis Oedipus or Saimiri sciureeus CDR (epsilon) chain, wherein the epitope is part of an amino acid sequence comprised in the group consisting of SEQ ID NOs. 2, 4, 6, or 8, and comprises at least the amino acid sequence Gln-Asp-Gly-Asn-Glu (QDGNE), and a second binding domain capable of binding to an antigen selected from the group consisting of Prostate Stem Cell Antigen (PSCA), B-Lymphocyte antigen CD19 (CD19), hepatocyte growth factor receptor (C-MET), Endosialin, the EGF-like domain 1 of EpCAM, encoded by exon 2, Fibroblast activation protein alpha (FAP alpha) and Insulin-like growth factor I receptor (IGF-IR or IGF-1R).

2. The bispecific single chain antibody molecule of claim 1, wherein at least one of said first or second binding domain is CDR-grafted, humanized or human.

3. The bispecific single chain antibody molecule according to claim 1, wherein the first binding domain capable of binding to an epitope of human and non-chimpanzee primate CDR chain comprises a VL region comprising CDR-L1, CDR-L2 and CDR-L3 selected from:
(a) CDR-L1 as depicted in SEQ ID NO. 27, CDR-L2 as depicted in SEQ ID NO. 28 and CDR-L3 as depicted in SEQ ID NO. 29;
(b) CDR-L1 as depicted in SEQ ID NO. 117, CDR-L2 as depicted in SEQ ID NO. 118 and CDR-L3 as depicted in SEQ ID NO. 119; and
(c) CDR-L1 as depicted in SEQ ID NO. 153, CDR-L2 as depicted in SEQ ID NO. 154 and CDR-L3 as depicted in SEQ ID NO. 155.

4. The bispecific single chain antibody molecule according to claim 1, wherein the first binding domain capable of binding to an epitope of human and non-chimpanzee primate CD3E chain comprises a VH region comprising CDR-H 1, CDR-112 and CDR-H3 selected from:
(a) CDR-H1 as depicted in SEQ ID NO. 12, CDR-H2 as depicted in SEQ ID NO. 13 and CDR-H3 as depicted in SEQ ID NO. 14; (b) CDR-H1 as depicted in SEQ ID NO. 30, CDR-H2 as depicted in SEQ ID NO. 31 and CDR-H3 as depicted in SEQ ID NO. 32;
(c) CDR-H1 as depicted in SEQ ID NO. 48, CDR-H2 as depicted in SEQ ID NO. 49 and CDR-H3 as depicted in SEQ ID NO. 50;
(d) CDR-H1 as depicted in SEQ ID NO. 66, CDR-H2 as depicted in SEQ ID NO. 67 and CDR-H3 as depicted in SEQ ID NO. 68;
(e) CDR-H1 as depicted in SEQ ID NO. 84, CDR-H2 as depicted in SEQ ID NO. 85 and CDR-H3 as depicted in SEQ ID NO. 86;
(f) CDR-H1 as depicted in SEQ ID NO. 102, CDR-H2 as depicted in SEQ ID NO. 103 and CDR-H3 as depicted in SEQ ID NO. 104;
(g) CDR-H1 as depicted in SEQ ID NO. 120, CDR-H2 as depicted in SEQ ID NO. 121 and CDR-H3 as depicted in SEQ ID NO. 122;
(h) CDR-H1 as depicted in SEQ ID NO. 138, CDR-H2 as depicted in SEQ ID NO. 139 and CDR-H3 as depicted in SEQ ID NO. 140;
(i) CDR-H1 as depicted in SEQ ID NO. 156, CDR-H2 as depicted in SEQ ID NO. 157 and CDR-H3 as depicted in SEQ ID NO. 158; and
(j) CDR-H1 as depicted in SEQ ID NO. 174, CDR-H2 as depicted in SEQ ID NO. 175 and CDR-H3 as depicted in SEQ ID NO. 176.

5. The bispecific single chain antibody molecule according to claim 1, wherein the first binding domain capable of binding to an epitope of human and non-chimpanzee primate CD3E chain comprises a VL region selected from the group consisting of a VL region as depicted in SEQ ID NO. 35, 39, 125, 129, 161 or 165.

6. The bispecific single chain antibody molecule according to claim 1, wherein the first binding domain capable of binding to an epitope of human and non-chimpanzee primate CDR chain comprises a VH region selected from the group consisting of a VH region as depicted in SEQ ID NO. 15, 19, 33, 37, 51, 55, 69, 73, 87, 91, 105, 109, 123, 127, 141, 145, 159, 163, 177 or 181.

7. The bispecific single chain antibody molecule according to claim 1, wherein the first binding domain capable of binding to an epitope ofhuman and non-chimpanzee primate CDR chain comprises a VL region and a VH region selected from the group consisting of:
(a) a VL region as depicted in SEQ ID NO. 17 or 21 and a VH region as depicted in SEQ ID NO. 15 or 19;
(b) a VL region as depicted in SEQ ID NO. 35 or 39 and a VH region as depicted in SEQ ID NO. 33 or 37;
(c) a VL region as depicted in SEQ ID NO. 53 or 57 and a VH region as depicted in SEQ ID NO. 51 or 55;
(d) a VL region as depicted in SEQ ID NO. 71 or 75 and a VH region as depicted in SEQ ID NO. 69 or 73;
(e) a VL region as depicted in SEQ ID NO. 89 or 93 and a VH region as depicted in SEQ ID NO. 87 or 91;
(f) a VL region as depicted in SEQ ID NO. 107 or 111 and a VH region as depicted in SEQ ID NO. 105 or 109;
(g) a VL region as depicted in SEQ ID NO. 125 or 129 and a VH region as depicted in SEQ ID NO. 123 or 127;
(h) a VL region as depicted in SEQ ID NO. 143 or 147 and a VH region as depicted in SEQ ID NO. 141 or 145;
(i) a VL region as depicted in SEQ ID NO. 161 or 165 and a VH region as depicted in SEQ ID NO. 159 or 163; and
(j) a VL region as depicted in SEQ ID NO. 179 or 183 and a VH region as depicted in SEQ ID NO. 177 or 181.

8. The bispecific single chain antibody molecule according to claim 7, wherein the first binding domain capable of binding to an epitope of human and nonchimpanzee primate CD3ε chain comprises an amino acid sequence selected from the group consisting of SEQ ID NOs: 23, 25, 41, 43, 59, 61, 77, 79, 95, 97, 113, 115, 131, 133, 149, 151, 167, 169, 185 or 187.

9. The bispecific single chain antibody molecule according to claim 1, wherein the second binding domain is capable of binding to human Prostate Stem Cell Antigen (PSCA) and/or a non-Chimpanzee primate PSCA.

10. The bispecific single chain antibody molecule according to claim 9, wherein the bispecific single chain antibody molecule comprises a group of the following sequences as CDR H1, CDR H2, CDR H3, CDR L1, CDR L2 and CDR L3 in the second binding domain selected from:
a) CDR H1-3 of SEQ ID NO: 382-384 and CDR L1-3 of SEQ ID NO: 377-379;
b) CDR H1-3 of SEQ ID NO: 400-402 and CDR L1-3 of SEQ ID NO: 395-397;
c) CDR H1-3 of SEQ ID NO: 414-416 and CDR L1-3 of SEQ ID NO: 409-411;
d) CDR H1-3 of SEQ ID NO: 432-434 and CDR L1-3 of SEQ ID NO: 427-429;
e) CDR H1-3 of SEQ ID NO: 1215-1217 and CDR L1-3 of SEQ ID NO: 1220-1222;
f) CDR H1-3 of SEQ ID NO: 1187-1189 and CDR L1-3 of SEQ ID NO: 1192-1194;
g) CDR H1-3 of SEQ ID NO: 1173-1175 and CDR L1-3 of SEQ ID NO: 1178-1180;
h) CDR H1-3 of SEQ ID NO: 1229-1231 and CDR L1-3 of SEQ ID NO: 1234-1236;
i) CDR H1-3 of SEQ ID NO: 1201-1203 and CDR L1-3 of SEQ ID NO: 1206-1208;
k) CDR H1-3 of SEQ ID NO: 1257-1259 and CDR L1-3 of SEQ ID NO: 1262-1264; and
l) CDR H1-3 of SEQ ID NO: 1243-1245 and CDR L1-3 of SEQ ID NO: 1248-1250.

11. The bispecific single chain antibody molecule of claim 10, wherein the binding domains are arranged in the order VH PSCA-VL PSCA-VH CD3-VL CD3 or VL PSCA-VH PSCA-VH CD3-VL CD3.

12. The bispecific single chain antibody molecule according to claim 11, wherein the bispecific single chain antibody molecule comprises a sequence selected from:
(a) an amino acid sequence as depicted in any of SEQ ID NOs: 389, 421, 439, 391, 405, 423, 441, 1226, 1198, 1184, 1240, 1212, 1268 or 1254;
(b) an amino acid sequence encoded by a nucleic acid sequence as depicted in any of SEQ ID NOs: 390, 422, 440, 392, 406, 424, 442, 1227, 1199, 1185, 1241, 1213 1269 or 1255; and
(c) an amino acid sequence at least 90% identical, more preferred at least 95% identical, most preferred at least 96% identical to the amino acid sequence of (a) or (b).

13. The bispecific single chain antibody molecule according to claim 1, wherein the second binding domain is capable of binding to human BLymphocyte antigen CD19 (CD19), and/or a non-Chimpanzee primate CD19.

14. The bispecific single chain antibody molecule according to claim 13, wherein the bispecific single chain antibody molecule comprises a group of the following sequences as CDR H1, CDR H2, CDR H3, CDR L1, CDR L2 and CDR L3 in the second binding domain selected from:
a) CDR H1-3 of SEQ ID NO: 478-480 and CDR L1-3 of SEQ ID NO: 473-475;
b) CDR H1-3 of SEQ ID NO: 530-532 and CDR L1-3 of SEQ ID NO: 525-527;
c) CDR H1-3 of SEQ ID NO: 518-520 and CDR L1-3 of SEQ ID NO: 513-515; and
d) CDR H1-3 of SEQ ID NO: 506-508 and CDR L1-3 of SEQ ID NO: 501-503;
e) CDR H1-3 of SEQ ID NO: 494-496 and CDR L1-3 of SEQ ID NO: 489-491;
f) CDR H1-3 of SEQ ID NO: 542-544 and CDR L1-3 of SEQ ID NO: 537-539;
g) CDR H1-3 of SEQ ID NO: 554-556 and CDR L1-3 of SEQ ID NO: 549-551;
h) CDR H1-3 of SEQ ID NO: 566-568 and CDR L1-3 of SEQ ID NO: 561-563;
i) CDR H1-3 of SEQ ID NO: 578-580 and CDR L1-3 of SEQ ID NO: 573-575;
j) CDR H1-3 of SEQ ID NO: 590-592 and CDR L1-3 of SEQ ID NO: 585-587;
k) CDR H1-3 of SEQ ID NO: 602-604 and CDR L1-3 of SEQ ID NO: 597-599;
l) CDR H1-3 of SEQ ID NO: 614-616 and CDR L1-3 of SEQ ID NO: 609-611;
m) CDR H1-3 of SEQ ID NO: 626-628 and CDR L1-3 of SEQ ID NO: 621-623;
n) CDR H1-3 of SEQ ID NO: 638-640 and CDR L1-3 of SEQ ID NO: 633-635;
o) CDR H1-3 of SEQ ID NO: 650-652 and CDR L1-3 of SEQ ID NO: 645-647;
p) CDR H1-3 of SEQ ID NO: 662-664 and CDR L1-3 of SEQ ID NO: 657-659;
q) CDR H1-3 of SEQ ID NO: 674-676 and CDR L1-3 of SEQ ID NO: 669-671;
r) CDR H1-3 of SEQ ID NO: 686-688 and CDR L1-3 of SEQ ID NO: 681-683;
s) CDR H1-3 of SEQ ID NO: 698-700 and CDR L1-3 of SEQ ID NO: 693-695;
t) CDR H1-3 of SEQ ID NO: 710-712 and CDR L1-3 of SEQ ID NO: 705-707;
u) CDR H1-3 of SEQ ID NO: 722-724 and CDR L1-3 of SEQ ID NO: 717-719;
v) CDR H1-3 of SEQ ID NO: 734-736 and CDR L1-3 of SEQ ID NO: 729-731;
w) CDR H1-3 of SEQ ID NO: 746-748 and CDR L1-3 of SEQ ID NO: 741-743;
x) CDR H1-3 of SEQ ID NO: 758-760 and CDR L1-3 of SEQ ID NO: 753-755;
y) CDR H1-3 of SEQ ID NO: 1271-1273 and CDR L1-3 of SEQ ID NO: 1276-1278;
z) CDR H1-3 of SEQ ID NO: 1285-1287 and CDR L1-3 of SEQ ID NO: 1290-1292;
aa) CDR H1-3 of SEQ ID NO: 1299-1301 and CDR L1-3 of SEQ ID NO:1304-1306;
ab) CDR H1-3 of SEQ ID NO: 1313-1315 and CDR L1-3 of SEQ ID NO:1318-1320;
ac) CDR H1-3 of SEQ ID NO: 1327-1329 and CDR L1-3 of SEQ ID NO:1332-1334;
ad) CDR H1-3 of SEQ ID NO: 1341-1343 and CDR L1-3 of SEQ ID NO:1346-1348;
ae) CDR H1-3 of SEQ ID NO: 1355-1357 and CDR L1-3 of SEQ ID NO:1360-1362;
af) CDR H1-3 of SEQ ID NO: 1369-1371 and CDR L1-3 of SEQ ID NO: 1374-1376; and
ag) CDR H1-3 of SEQ ID NO: 1383-1385 and CDR L1-3 of SEQ ID NO:1388-1390.

15. The bispecific single chain antibody molecule of claim 14, wherein the binding domains are arranged in the order VH CD19-VL CD19-VH CD3-VL CD3 or VL CD19-VH CD19-VH CD3-VL CD3.

16. The bispecific single chain antibody molecule according to claim 15, wherein the bispecific single chain antibody molecule comprises a sequence selected from:
(a) an amino acid sequence as depicted in any of SEQ ID NOs:481, 485, 483, 533, 521, 509, 497, 545, 557, 569, 581, 593, 605, 617, 629, 641, 653, 665, 677, 689, 701, 713, 725, 737, 749, 761, 1282, 1296, 1310, 1324, 1338, 1352, 1366, 1380 or 1394;
(b) an amino acid sequence encoded by a nucleic acid sequence as depicted in any of SEQ ID NOs: 482, 486, 484, 534, 522, 510, 498, 546, 558, 570, 582, 594, 606, 618, 630, 642, 654, 666, 678, 690, 702, 714, 726, 738, 750, 762, 1283, 1297, 1311, 1325, 1339, 1353, 1367, 1381 or 1395; and
(c) an amino acid sequence at least 90% identical, more preferred at least 95% identical, most preferred at least 96% identical to the amino acid sequence of (a) or (b).

17. The bispecific single chain antibody molecule according to claim 1, wherein the second binding domain is capable of binding to human hepatocyte growth factor receptor (C-MET), and/or a non-Chimpanzee primate C-MET.

18. The bispecific single chain antibody molecule according to claim 17, wherein the bispecific single chain antibody molecule comprises a group of the following sequences as CDR H1, CDR H2, CDR H3, CDR L1, CDR L2 and CDR L3 in the second binding domain selected from:
a) CDR H1-3 of SEQ ID NO: 821-823 and CDR L1-3 of SEQ ID NO: 816-818;
b) CDR H1-3 of SEQ ID NO: 836-838 and CDR L1-3 of SEQ ID NO: 833-835;
c) CDR H1-3 of SEQ ID NO: 845-847 and CDR L1-3 of SEQ ID NO: 840-842; and
d) CDR H1-3 of SEQ ID NO: 863-865 and CDR L1-3 of SEQ ID NO: 858-860;
e) CDR H1-3 of SEQ ID NO: 881-883 and CDR L1-3 of SEQ ID NO: 876-878;
f) CDR H1-3 of SEQ ID NO: 899-901 and CDR L1-3 of SEQ ID NO: 894-896;
g) CDR H1-3 of SEQ ID NO: 1401-1403 and CDR L1-3 of SEQ ID NO: 1406-1408;
h) CDR H1-3 of SEQ ID NO: 1415-1417 and CDR L1-3 of SEQ ID NO: 1420-1422;
i) CDR H1-3 of SEQ ID NO: 1429-1431 and CDR L1-3 of SEQ ID NO: 1434-1436;
j) CDR H1-3 of SEQ ID NO: 1443-1445 and CDR L1-3 of SEQ ID NO: 1448-1450;
k) CDR H1-3 of SEQ ID NO: 1457-1459 and CDR L1-3 of SEQ ID NO: 1462-1464;
l) CDR H1-3 of SEQ ID NO: 1471-1473 and CDR L1-3 of SEQ ID NO: 1476-1478;
m) CDR H1-3 of SEQ ID NO: 1639-1641 and CDR L1-3 of SEQ ID NO: 1644-1646;
n) CDR H1-3 of SEQ ID NO: 1625-1627 and CDR L1-3 of SEQ ID NO: 1630-1632;
o) CDR H1-3 of SEQ ID NO: 1611-1613 and CDR L1-3 of SEQ ID NO: 1616-1618;
p) CDR H1-3 of SEQ ID NO: 1597-1599 and CDR L1-3 of SEQ ID NO: 1602-1604;
q) CDR H1-3 of SEQ ID NO: 1569-1571 and CDR L1-3 of SEQ ID NO: 1574-1576;
r) CDR H1-3 of SEQ ID NO: 1555-1557 and CDR L1-3 of SEQ ID NO: 1560-1562;
s) CDR H1-3 of SEQ ID NO: 1583-1585 and CDR L1-3 of SEQ ID NO: 1588-1590;
t) CDR H1-3 of SEQ ID NO: 1541-1543 and CDR L1-3 of SEQ ID NO: 1546-1548;
u) CDR H1-3 of SEQ ID NO: 1513-1515 and CDR L1-3 of SEQ ID NO: 1518-1520;
v) CDR H1-3 of SEQ ID NO: 1527-1529 and CDR L1-3 of SEQ ID NO: 1532-1534;
w) CDR H1-3 of SEQ ID NO: 1499-1501 and CDR L1-3 of SEQ ID NO: 1504-1506; and
x) CDR H1-3 of SEQ ID NO: 1485-1487 and CDR L1-3 of SEQ ID NO: 1490-1492.

19. The bispecific single chain antibody molecule of claim 18, wherein the binding domains are arranged in the order VH C-MET-VL C-MET-VH CD3-VL CD3 or VL C-MET-VH C-MET-VH CD3-VL CD3.

20. The bispecific single chain antibody molecule according to claim 19, wherein the bispecific single chain antibody molecule comprises a sequence selected from:
(a) an amino acid sequence as depicted in any of SEQ ID NOs: 829, 853, 871, 889, 831, 855, 873, 891, 905, 1412, 1426, 1440, 1454, 1468, 1482, or;
(b) an amino acid sequence encoded by a nucleic acid sequence as depicted in any of SEQ ID NOs:830, 854, 872, 890, 832, 856, 874, 892, 906, 1413, 1427, 1441, 1455, 1469, or 1483; and
(c) an amino acid sequence at least 90% identical, more preferred at least 95% identical, most preferred at least 96% identical to the amino acid sequence of (a) or (b).

21. The bispecific single chain antibody molecule according to claim 1, wherein the second binding domain is capable of binding to human Endosialin, and/or a non-chimpanzee primate Endosialin.

22. The bispecific single chain antibody molecule according to claim 21, wherein the bispecific single chain antibody molecule comprises a group of the following sequences as CDR H1, CDR H2, CDR H3, CDR L1, CDR L2 and CDR L3 in the second binding domain selected from:
a) CDR H1-3 of SEQ ID NO: 1653-1655 and CDR L1-3 of SEQ ID NO: 1658-1660;
b) CDR H1-3 of SEQ ID NO: 1667-1669 and CDR L1-3 of SEQ ID NO: 1672-1674;
c) CDR H1-3 of SEQ ID NO: 1681-1683 and CDR L1-3 of SEQ ID NO: 1686-1688; and
d) CDR H1-3 of SEQ ID NO: 1695-1697 and CDR L1-3 of SEQ ID NO: 1700-1702;
e) CDR H1-3 of SEQ ID NO: 1709-1711 and CDR L1-3 of SEQ ID NO: 1714-1716; and
f) CDR H1-3 of SEQ ID NO: 1723-1725 and CDR L1-3 of SEQ ID NO: 1728-1730.

23. The bispecific single chain antibody molecule of claim 22, wherein the binding domains are arranged in the order VH Endosialin-VL Endosialin-VH CD3-VL CD3 or VL Endosialin-VH Endosialin-VH CD3-VL CD3.

24. The bispecific single chain antibody molecule according to claim 23, wherein the bispecific single chain antibody molecule comprises a sequence selected from:
(a) an amino acid sequence as depicted in any of SEQ ID NOs: 1664, 1678, 1692, 1706, 1720, or 1734;
(b) an amino acid sequence encoded by a nucleic acid sequence as depicted in any of SEQ ID NOs: 1665, 1679, 1693, 1707, 1721, or 1735; and
(c) an amino acid sequence at least 90% identical, more preferred at least 95% identical, most preferred at least 96% identical to the amino acid sequence of (a) or (b).

25. The bispecific single chain antibody molecule according to claim 1, wherein the second binding domain is capable of binding to human EpCAM, and/or a non-Chimpanzee primate EpCAM.

26. The bispecific single chain antibody molecule according to claim 25, wherein the bispecific single chain antibody molecule comprises a group of the following sequences as CDR H1, CDR H2, CDR H3, CDR L1, CDR L2 and CDR L3 in the second binding domain selected from:
a) CDR H1-3 of SEQ ID NO: 940-942 and CDR L1-3 of SEQ ID NO: 935-937;
b) CDR H1-3 of SEQ ID NO: 956-958 and CDR L1-3 of SEQ ID NO: 951-953;
c) CDR H1-3 of SEQ ID NO: 968-970 and CDR L1-3 of SEQ ID NO: 963-965;
d) CDR H1-3 of SEQ ID NO: 980-982 and CDR L1-3 of SEQ ID NO: 975-977;
e) CDR H1-3 of SEQ ID NO: 992-994 and CDR L1-3 of SEQ ID NO: 987-989;
f) CDR H1-3 of SEQ ID NO: 1004-1006 and CDR L1-3 of SEQ ID NO: 999-1001;
g) CDR H1-3 of SEQ ID NO: 1028-1030 and CDR L1-3 of SEQ ID NO: 1023-1025;
h) CDR H1-3 of SEQ ID NO: 1040-1042 and CDR L1-3 of SEQ ID NO: 1035-1037;
i) CDR H1-3 of SEQ ID NO: 1052-1054 and CDR L1-3 of SEQ ID NO: 1047-1049;
j) CDR H1-3 of SEQ ID NO: 1074-1076 and CDR L1-3 of SEQ ID NO: 1069-1071;
k) CDR H1-3 of SEQ ID NO: 1086-1088 and CDR L1-3 of SEQ ID NO: 1081-1083;
l) CDR H1-3 of SEQ ID NO: 1098-1000 and CDR L1-3 of SEQ ID NO: 1093-1095;
m) CDR H1-3 of SEQ ID NO: 1110-1112 and CDR L1-3 of SEQ ID NO: 1105-1107;
n) CDR H1-3 of SEQ ID NO: 1122-1124 and CDR L1-3 of SEQ ID NO: 1117-1119;
o) CDR H1-3 of SEQ ID NO: 1016-1018 and CDR L1-3 of SEQ ID NO: 1011-1013; and
p) CDR H1-3 of SEQ ID NO: 1765-1767 and CDR L1-3 of SEQ ID NO: 1770-1772.

27. The bispecific single chain antibody molecule of claim 26, wherein the binding domains are arranged in the order VH EpCAM-VL EpCAM-VH CD3-VL CD3 or VL EpCAM-VH EpCAM-VH CD3-VL CD3.

28. The bispecific single chain antibody molecule according to claim 27, wherein the bispecific single chain antibody molecule comprises a sequence selected from:
(a) an amino acid sequence as depicted in any of SEQ ID NOs: 944, 948, 946, 960, 972, 984, 996, 1008, 1032, 1044, 1056, 1078, 1090, 1102, 1114, 1126, 1020, or 1776;
(b) an amino acid sequence encoded by a nucleic acid sequence as depicted in any of SEQ ID NOs: 945, 949, 947, 961, 973, 985, 979, 1009, 1033, 1045, 1057, 1079, 1091, 1103, 1115, 1127, 1021, or 1777; and
(c) an amino acid sequence at least 90% identical, more preferred at least 95% identical, most preferred at least 96% identical to the amino acid sequence of (a) or (b).

29. The bispecific single chain antibody molecule according to claim 1, wherein the second binding domain is capable of binding to human Fibroblast activation protein alpha (FAP alpha), and/or a non-Chimpanzee primate FAP alpha.

30. The bispecific single chain antibody molecule according to claim 29, wherein the bispecific single chain antibody molecule comprises a group of the following sequences as CDR H1, CDR H2, CDR H3, CDR L1, CDR L2 and CDR L3 in the second binding domain selected from:
a) CDR H1-3 of SEQ ID NO: 1137-1139 and CDR L1-3 of SEQ ID NO: 1132-1134;
b) CDR H1-3 of SEQ ID NO: 1849-1851 and CDR L1-3 of SEQ ID NO: 1854-1856;
c) CDR H1-3 of SEQ ID NO: 1835-1837 and CDR L1-3 of SEQ ID NO: 1840-1842;
d) CDR H1-3 of SEQ ID NO: 1779-1781 and CDR L1-3 of SEQ ID NO: 1784-1786;
e) CDR H1-3 of SEQ ID NO: 1793-1795 and CDR L1-3 of SEQ ID NO: 1798-1800;
f) CDR H1-3 of SEQ ID NO: 1863-1865 and CDR L1-3 of SEQ ID NO: 1868-1870;
g) CDR H1-3 of SEQ ID NO: 1807-1809 and CDR L1-3 of SEQ ID NO: 1812-1814;
h) CDR H1-3 of SEQ ID NO: 1821-1823 and CDR L1-3 of SEQ ID NO: 1826-1828;
i) CDR H1-3 of SEQ ID NO: 1891-1893 and CDR L1-3 of SEQ ID NO: 1896-1898;
j) CDR H1-3 of SEQ ID NO: 1877-1879 and CDR L1-3 of SEQ ID NO: 1882-1884;
k) CDR H1-3 of SEQ ID NO: 1961-1963 and CDR L1-3 of SEQ ID NO: 1966-1968;
l) CDR H1-3 of SEQ ID NO: 1947-1949 and CDR L1-3 of SEQ ID NO: 1952-1954;
m) CDR H1-3 of SEQ ID NO: 1975-1977 and CDR L1-3 of SEQ ID NO: 1980-1982;
n) CDR H1-3 of SEQ ID NO: 1933-1935 and CDR L1-3 of SEQ ID NO: 1938-1940;
o) CDR H1-3 of SEQ ID NO: 1919-1921 and CDR L1-3 of SEQ ID NO: 1924-1926; and
p) CDR H1-3 of SEQ ID NO: 1905-1907 and CDR L1-3 of SEQ ID NO: 1910-1912.

31. The bispecific single chain antibody molecule of claim 30, wherein the binding domains are arranged in the order VH FAP alpha-VL FAP alpha-VH CD3-VL CD3 or VL FAP alpha-VH FAP alpha-VH CD3-VL CD3.

32. The bispecific single chain antibody molecule according to claim 31, wherein the bispecific single chain antibody molecule comprises a sequence selected from:
(a) an amino acid sequence as depicted in any of SEQ ID NOs: 1143, 1147, 1145, 1860, 1846, 1790, 1804, 1874, 1818, or 1832;
(b) an amino acid sequence encoded by a nucleic acid sequence as depicted in any of SEQ ID NOs: 1144, 1148, 1146, 1861, 1847, 1791, 1805, 1875, 1818 or 1833; and
(c) an amino acid sequence at least 90% identical, more preferred at least 95% identical, most preferred at least 96% identical to the amino acid sequence of (a) or (b).

33. The bispecific single chain antibody molecule according to claim 1, wherein the second binding domain is capable of binding to human Insulin-like growth factor I receptor (IGF-IR or IGF-1R), and/or a non-Chimpanzee primate IGF-1R.

34. The bispecific single chain antibody molecule according to claim 33, wherein the bispecific single chain antibody molecule comprises a group of the following sequences as CDR H1, CDR H2, CDR H3, CDR L1, CDR L2 and CDR L3 in the second binding domain selected from:
a) CDR H1-3 of SEQ ID NO: 2016-2018 and CDR L1-3 of SEQ ID NO: 2021-2023;
b) CDR H1-3 of SEQ ID NO: 2030-2032 and CDR L1-3 of SEQ ID NO: 2035-2037;
c) CDR H1-3 of SEQ ID NO: 2044-2046 and CDR L1-3 of SEQ ID NO: 2049-2051;
d) CDR H1-3 of SEQ ID NO: 2058-2060 and CDR L1-3 of SEQ ID NO: 2063-2065;
e) CDR H1-3 of SEQ ID NO: 2072-2074 and CDR L1-3 of SEQ ID NO: 2077-2079;
f) CDR H1-3 of SEQ ID NO: 2086-2088 and CDR L1-3 of SEQ ID NO: 2091-2093;
g) CDR H1-3 of SEQ ID NO: 2100-2102 and CDR L1-3 of SEQ ID NO: 2105-2107;
h) CDR H1-3 of SEQ ID NO: 2114-2116 and CDR L1-3 of SEQ ID NO: 2119-2121;
i) CDR H1-3 of SEQ ID NO: 2128-2130 and CDR L1-3 of SEQ ID NO: 2133-2135;
j) CDR H1-3 of SEQ ID NO: 2142-2144 and CDR L1-3 of SEQ ID NO: 2147-2149:
k) CDR H1-3 of SEQ ID NO: 2156-2158 and CDR L1-3 of SEQ ID NO: 2161-2163;
l) CDR H1-3 of SEQ ID NO: 2170-2172 and CDR L1-3 of SEQ ID NO: 2175-2177;
m) CDR H1-3 of SEQ ID NO: 2184-2186 and CDR L1-3 of SEQ ID NO: 2189-2191;
n) CDR H1-3 of SEQ ID NO: 2198-2200 and CDR L1-3 of SEQ ID NO: 2203-2205; and
o) CDR H1-3 of SEQ ID NO: 2212-2214 and CDR L1-3 of SEQ ID NO: 2217-2219.

35. The bispecific single chain antibody molecule of claim 34, wherein the binding domains are arranged in the order VH IGF-1R-VL IGF-1R-VH CD3-VL CD3 or VL IGF-1R-VH IGF-1R-VH CD3-VL CD3.

36. The bispecific single chain antibody molecule according to claim 35, wherein the bispecific single chain antibody molecule comprises a sequence selected from:
(a) an amino acid sequence as depicted in any of SEQ ID NOs: 2027, 2041, 2055, 2069, 2083, 2097, 2111, 2125, 2139, 2153, 2167, 2181, 2195, 2209, or 2223;
(b) an amino acid sequence encoded by a nucleic acid sequence as depicted in any of SEQ ID NOs: 2028, 2042, 2056, 2070, 2084, 2098, 2112, 2126, 2140, 2154, 2168, 2182, 2196, 2210, or 2224; and
(c) an amino acid sequence at least 90% identical, more preferred at least 95% identical, most preferred at least 96% identical to the amino acid sequence of (a) or (b).

37. A nucleic acid sequence encoding a bispecific single chain antibody molecule as defined in claim 1.

38. A vector, which comprises a nucleic acid sequence as defined in claim 37.

39. The vector of claim 38, wherein said vector further comprises a regulatory sequence, which is operably linked to said nucleic acid sequence.

40. The vector of claim 39, wherein said vector is an expression vector.

41. A host transformed or transfected with a vector defined in claim 38.

42. A process for the production of a bispecific single chain antibody molecule according to claim 1, said process comprising culturing a host transformed or transfected with a vector comprising a nucleic acid sequence encoding a bispecific single chain antibody molecule as defined in claim 1 under conditions allowing the expression of the polypeptide as defined in claim 1 and recovering the produced polypeptide from the culture.

43. A pharmaceutical composition comprising a bispecific single chain antibody molecule according to claim 1.

44.-51. (canceled)

52. A method for the prevention, treatment or amelioration of a disease in a subject in the need thereof, said method comprising the step of administration of an effective amount of a pharmaceutical composition of claim 43.

53. The method of claim 52, wherein said disease is cancer.

54. The method of claim 53, wherein said cancer is/are
(a) prostate cancer, bladder cancer or pancreatic cancer;
(b) a B-cell malignancy, such as B-NHL (B cell non-Hodgkin Lymphoma), BALL
(acute lymphoblastic B cell leukemia), B-CLL (chronic lymphocytic B cell leukemia), or Multiple Myeloma;
(c) a carcinoma, sarcoma, glioblastoma/astrocytoma, melanoma, mesothelioma, Wilms tumor or a hematopoietic malignancy such as leukemia, lymphoma or multiple myeloma;
(d) carcinomas (breast, kidney, lung, colorectal, colon, pancreas mesothelioma), sarcomas, and neuroectodermal tumors (melanoma, glioma, neuroblastoma);
(e) epithelial cancer or a minimal residual cancer;
(f) epithelial cancer; or
(g) bone or soft tissue cancer (e.g. Ewing sarcoma), breast, liver, lung, head and neck, colorectal, prostate, leiomyosarcoma, cervical and endometrial cancer, ovarian, prostate, and pancreatic cancer.

55. The method of claim 52, wherein said pharmaceutical composition is administered in combination with an additional drug.

56. The method of claim 55, wherein said drug is a non-proteinaceous compound or a proteinaceous compound.

57. The method of claim 56, wherein said proteinaceous compound or nonproteinaceous compound is administered simultaneously or nonsimultaneously with said pharmaceutical composition.

58. The method of claim 52, wherein said subject is a human.

59. A kit comprising a bispecific single chain antibody molecule as defined in claim 1.

60. The polypeptide as defined in claim 1, wherein the epitope is part of an amino acid sequence comprised in the group consisting of SEQ ID NOs:2, 4, 6 and 8 and comprises at least the amino acid sequence Gln-Asp-Gly-Asn-Glu.

The application's sequence listing, which the Patent Office published only in electronic form, follows.

SEQUENCE LISTING (2227 sequences)

SEQ ID NO: 1 - protein, 105 aa, Homo sapiens
QDGNEEMGGITQTPYKVSISGTTVILTCPQYPGSEILWQHNDKNIGGDEDDKNIGSDEDHLSLKEFSELEQSGYYVCYPRGSKPEDANFYLYLRARVCENCMEMD

SEQ ID NO: 2 - protein, 27 aa, Homo sapiens
QDGNEEMGGITQTPYKVSISGTTVILT

SEQ ID NO: 3 - protein, 96 aa, Callithrix jacchus
QDGNEEMGDTTQNPYKVSISGTTVTLTCPRYDGHEIKWLVNSQNKEGHEDHLLLEDFSEMEQSGYYACLSKETPAEEASHYLYLKARVCENCVEVD

SEQ ID NO: 4 - protein, 27 aa, Callithrix jacchus
QDGNEEMGDTTQNPYKVSISGTTVTLT

SEQ ID NO: 5 - protein, 96 aa, Saguinus oedipus; identical to SEQ ID NO: 3

SEQ ID NO: 6 - protein, 27 aa, Saguinus oedipus
QDGNEEMGDTTQNPYKVSISGTTVTLT

SEQ ID NO: 7 - protein, 96 aa, Saimiri sciureus
QDGNEEIGDTTQNPYKVSISGTTVTLTCPRYDGQEIKWLVNDQNKEGHEDHLLLEDFSEMEQSGYYACLSKETPTEEASHYLYLKARVCENCVEVD

SEQ ID NO: 8 - protein, 27 aa, Saminiri sciureus
QDGNEEIGDTTQNPYKVSISGTTVTLT

SEQ ID NO: 9 - protein, 14 aa, Artificial Sequence
  CDR-L1 of F6A
GSSTGAVTSGYYPN

SEQ ID NO: 10 - protein, 7 aa, Artificial Sequence
  CDR-L2 of F6A
GTKFLAP

SEQ ID NO: 11 - protein, 9 aa, Artificial Sequence
  CDR-L3 of F6A
ALWYSNRWV

SEQ ID NO: 12 - protein, 5 aa, Artificial Sequence
  CDR-H1 of F6A
IYAMN

SEQ ID NO: 13 - protein, 19 aa, Artificial Sequence
  CDR-H2 of F6A
RIRSKYNNYATYYADSVKS

SEQ ID NO: 14 - protein, 14 aa, Artificial Sequence
  CDR-H3 of F6A
HGNFGNSYVSFFAY

SEQ ID NO: 15 - protein, 125 aa, Artificial Sequence
  VH of F6A
EVQLVESGGGLVQPGGSLKLSCAASGFTFNIYAMNWVRQAPGKGLEWVARIRSKYNNYATYYADSVKSRFTISRDDSKNTAYLQMNNLKTEDTAVYYCVRHGNFGNSYVSFFAYWGQGTLVTVSS

SEQ ID NO: 16 - DNA, 375 bp, Artificial Sequence
  VH of F6A
gaggtgcagctggtcgagtctggaggaggattggtgcagcctggagggtcattgaaactctcatgtgcagcctctggattcaccttcaatatctacgccatgaactgggtccgccaggctccaggaaagggtttggaatgggttgctcgcataagaagtaaatataataattatgcaacatattatgccgattcagtgaaaagcaggttcaccatctccagagatgattcaaaaaacactgcctatctacaaatgaacaacttgaaaactgaggacactgccgtgtactactgtgtgagacatgggaacttcggtaatagctacgtatccttcttcgcttactggggccaagggactctggtcaccgtctcctca

SEQ ID NO: 17 - protein, 109 aa, Artificial Sequence
  VL of F6A
QTVVTQEPSLTVSPGGTVTLTCGSSTGAVTSGYYPNWVQQKPGQAPRGLIGGTKFLAPGTPARFSGSLLGGKAALTLSGVQPEDEAEYYCALWYSNRWVFGGGTKLTVL

SEQ ID NO: 18 - DNA, 327 bp, Artificial Sequence
  VL of F6A
cagactgttgtgactcaggaaccttcactcaccgtatcacctggtggaacagtcacactcacttgtggctcctcgactggggctgttacatctggctactacccaaactgggtccaacaaaaaccaggtcaggcaccccgtggtctaataggtgggactaagttcctcgcccccggtactcctgccagattctcaggctccctgcttggaggcaaggctgccctcaccctctcaggggtacagccagaggatgaggcagaatattactgtgctctatggtacagcaaccgctgggtgttcggtggaggaaccaaactgactgtccta

SEQ ID NO: 19 - protein, 125 aa, Artificial Sequence
  VH-P of F6A
EVQLLESGGGLVQPGGSLKLSCAASGFTFNIYAMNWVRQAPGKGLEWVARIRSKYNNYATYYADSVKSRFTISRDDSKNTAYLQMNNLKTEDTAVYYCVRHGNFGNSYVSFFAYWGQGTLVTVSS

SEQ ID NO: 20 - DNA, 375 bp, Artificial Sequence
  VH-P of F6A
gaggtgcagctgctcgagtctggaggaggattggtgcagcctggagggtcattgaaactctcatgtgcagcctctggattcaccttcaatatctacgccatgaactgggtccgccaggctccaggaaagggtttggaatgggttgctcgcataagaagtaaatataataattatgcaacatattatgccgattcagtgaaaagcaggttcaccatctccagagatgattcaaaaaacactgcctatctacaaatgaacaacttgaaaactgaggacactgccgtgtactactgtgtgagacatgggaacttcggtaatagctacgtatccttcttcgcttactggggccaagggactctggtcaccgtctcctca

SEQ ID NO: 21 - protein, 109 aa, Artificial Sequence
  VL-P of F6A
ELVVTQEPSLTVSPGGTVTLTCGSSTGAVTSGYYPNWVQQKPGQAPRGLIGGTKFLAPGTPARFSGSLLGGKAALTLSGVQPEDEAEYYCALWYSNRWVFGGGTKLTVL

SEQ ID NO: 22 - DNA, 327 bp, Artificial Sequence
  VL-P of F6A
gagctcgttgtgactcaggaaccttcactcaccgtatcacctggtggaacagtcacactcacttgtggctcctcgactggggctgttacatctggctactacccaaactgggtccaacaaaaaccaggtcaggcaccccgtggtctaataggtgggactaagttcctcgcccccggtactcctgccagattctcaggctccctgcttggaggcaaggctgccctcaccctctcaggggtacagccagaggatgaggcagaatattactgtgctctatggtacagcaaccgctgggtgttcggtggaggaaccaaactgactgtccta

SEQ ID NO: 23 - protein, 249 aa, Artificial Sequence
  VH-VL of F6A
EVQLVESGGGLVQPGGSLKLSCAASGFTFNIYAMNWVRQAPGKGLEWVARIRSKYNNYATYYADSVKSRFTISRDDSKNTAYLQMNNLKTEDTAVYYCVRHGNFGNSYVSFFAYWGQGTLVTVSSGGGGSGGGGSGGGGSQTVVTQEPSLTVSPGGTVTLTCGSSTGAVTSGYYPNWVQQKPGQAPRGLIGGTKFLAPGTPARFSGSLLGGKAALTLSGVQPEDEAEYYCALWYSNRWVFGGGTKLTVL

SEQ ID NO: 24 - DNA, 747 bp, Artificial Sequence
  VH-VL of F6A
gaggtgcagctggtcgagtctggaggaggattggtgcagcctggagggtcattgaaactctcatgtgcagcctctggattcaccttcaatatctacgccatgaactgggtccgccaggctccaggaaagggtttggaatgggttgctcgcataagaagtaaatataataattatgcaacatattatgccgattcagtgaaaagcaggttcaccatctccagagatgattcaaaaaacactgcctatctacaaatgaacaacttgaaaactgaggacactgccgtgtactactgtgtgagacatgggaacttcggtaatagctacgtatccttcttcgcttactggggccaagggactctggtcaccgtctcctcaggtggtggtggttctggcggcggcggctccggtggtggtggttctcagactgttgtgactcaggaaccttcactcaccgtatcacctggtggaacagtcacactcacttgtggctcctcgactggggctgttacatctggctactacccaaactgggtccaacaaaaaccaggtcaggcaccccgtggtctaataggtgggactaagttcctcgcccccggtactcctgccagattctcaggctccctgcttggaggcaaggctgccctcaccctctcaggggtacagccagaggatgaggcagaatattactgtgctctatggtacagcaaccgctgggtgttcggtggaggaaccaaactgactgtccta

SEQ ID NO: 25 - protein, 249 aa, Artificial Sequence
  VH-VL-P of F6A
EVQLLESGGGLVQPGGSLKLSCAASGFTFNIYAMNWVRQAPGKGLEWVARIRSKYNNYATYYADSVKSRFTISRDDSKNTAYLQMNNLKTEDTAVYYCVRHGNFGNSYVSFFAYWGQGTLVTVSSGGGGSGGGGSGGGGSELVVTQEPSLTVSPGGTVTLTCGSSTGAVTSGYYPNWVQQKPGQAPRGLIGGTKFLAPGTPARFSGSLLGGKAALTLSGVQPEDEAEYYCALWYSNRWVFGGGTKLTVL

SEQ ID NO: 26 - DNA, 747 bp, Artificial Sequence
  VH-VL-P of F6A
gaggtgcagctgctcgagtctggaggaggattggtgcagcctggagggtcattgaaactctcatgtgcagcctctggattcaccttcaatatctacgccatgaactgggtccgccaggctccaggaaagggtttggaatgggttgctcgcataagaagtaaatataataattatgcaacatattatgccgattcagtgaaaagcaggttcaccatctccagagatgattcaaaaaacactgcctatctacaaatgaacaacttgaaaactgaggacactgccgtgtactactgtgtgagacatgggaacttcggtaatagctacgtatccttcttcgcttactggggccaagggactctggtcaccgtctcctcaggtggtggtggttctggcggcggcggctccggtggtggtggttctgagctcgttgtgactcaggaaccttcactcaccgtatcacctggtggaacagtcacactcacttgtggctcctcgactggggctgttacatctggctactacccaaactgggtccaacaaaaaccaggtcaggcaccccgtggtctaataggtgggactaagttcctcgcccccggtactcctgccagattctcaggctccctgcttggaggcaaggctgccctcaccctctcaggggtacagccagaggatgaggcagaatattactgtgctctatggtacagcaaccgctgggtgttcggtggaggaaccaaactgactgtccta

SEQ ID NO: 27 - protein, 14 aa, Artificial Sequence
  CDR-L1 of H2C
GSSTGAVTSGYYPN

SEQ ID NO: 28 - protein, 7 aa, Artificial Sequence
  CDR-L2 of H2C
GTKFLAP

SEQ ID NO: 29 - protein, 9 aa, Artificial Sequence
  CDR-L3 of H2C
ALWYSNRWV

SEQ ID NO: 30 - protein, 5 aa, Artificial Sequence
  CDR-H1 of H2C
KYAMN

SEQ ID NO: 31 - protein, 19 aa, Artificial Sequence
  CDR-H2 of H2C
RIRSKYNNYATYYADSVKD

SEQ ID NO: 32 - protein, 14 aa, Artificial Sequence
  CDR-H3 of H2C
HGNFGNSYISYWAY

SEQ ID NO: 33 - protein, 125 aa, Artificial Sequence
  VH of H2C
EVQLVESGGGLVQPGGSLKLSCAASGFTFNKYAMNWVRQAPGKGLEWVARIRSKYNNYATYYADSVKDRFTISRDDSKNTAYLQMNNLKTEDTAVYYCVRHGNFGNSYISYWAYWGQGTLVTVSS

SEQ ID NO: 34 - DNA, 375 bp, Artificial Sequence
  VH of H2C
gaggtgcagctggtcgagtctggaggaggattggtgcagcctggagggtcattgaaactctcatgtgcagcctctggattcaccttcaataagtacgccatgaactgggtccgccaggctccaggaaagggtttggaatgggttgctcgcataagaagtaaatataataattatgcaacatattatgccgattcagtgaaagacaggttcaccatctccagagatgattcaaaaaacactgcctatctacaaatgaacaacttgaaaactgaggacactgccgtgtactactgtgtgagacatgggaacttcggtaatagctacatatcctactgggcttactggggccaagggactctggtcaccgtctcctca

SEQ ID NO: 35 - protein, 109 aa, Artificial Sequence; identical to SEQ ID NO: 17
  VL of H2C

SEQ ID NO: 36 - DNA, 327 bp, Artificial Sequence; identical to SEQ ID NO: 18
  VL of H2C

SEQ ID NO: 37 - protein, 125 aa, Artificial Sequence
  VH-P of H2C
EVQLLESGGGLVQPGGSLKLSCAASGFTFNKYAMNWVRQAPGKGLEWVARIRSKYNNYATYYADSVKDRFTISRDDSKNTAYLQMNNLKTEDTAVYYCVRHGNFGNSYISYWAYWGQGTLVTVSS

SEQ ID NO: 38 - DNA, 375 bp, Artificial Sequence
  VH-P of H2C
gaggtgcagctgctcgagtctggaggaggattggtgcagcctggagggtcattgaaactctcatgtgcagcctctggattcaccttcaataagtacgccatgaactgggtccgccaggctccaggaaagggtttggaatgggttgctcgcataagaagtaaatataataattatgcaacatattatgccgattcagtgaaagacaggttcaccatctccagagatgattcaaaaaacactgcctatctacaaatgaacaacttgaaaactgaggacactgccgtgtactactgtgtgagacatgggaacttcggtaatagctacatatcctactgggcttactggggccaagggactctggtcaccgtctcctca

SEQ ID NO: 39 - protein, 109 aa, Artificial Sequence; identical to SEQ ID NO: 21
  VL-P of H2C

SEQ ID NO: 40 - DNA, 327 bp, Artificial Sequence; identical to SEQ ID NO: 22
  VL-P of H2C

SEQ ID NO: 41 - protein, 249 aa, Artificial Sequence
  VH-VL of H2C
EVQLVESGGGLVQPGGSLKLSCAASGFTFNKYAMNWVRQAPGKGLEWVARIRSKYNNYATYYADSVKDRFTISRDDSKNTAYLQMNNLKTEDTAVYYCVRHGNFGNSYISYWAYWGQGTLVTVSSGGGGSGGGGSGGGGSQTVVTQEPSLTVSPGGTVTLTCGSSTGAVTSGYYPNWVQQKPGQAPRGLIGGTKFLAPGTPARFSGSLLGGKAALTLSGVQPEDEAEYYCALWYSNRWVFGGGTKLTVL

SEQ ID NO: 42 - DNA, 747 bp, Artificial Sequence
  VH-VL of H2C
gaggtgcagctggtcgagtctggaggaggattggtgcagcctggagggtcattgaaactctcatgtgcagcctctggattcaccttcaataagtacgccatgaactgggtccgccaggctccaggaaagggtttggaatgggttgctcgcataagaagtaaatataataattatgcaacatattatgccgattcagtgaaagacaggttcaccatctccagagatgattcaaaaaacactgcctatctacaaatgaacaacttgaaaactgaggacactgccgtgtactactgtgtgagacatgggaacttcggtaatagctacatatcctactgggcttactggggccaagggactctggtcaccgtctcctcaggtggtggtggttctggcggcggcggctccggtggtggtggttctcagactgttgtgactcaggaaccttcactcaccgtatcacctggtggaacagtcacactcacttgtggctcctcgactggggctgttacatctggctactacccaaactgggtccaacaaaaaccaggtcaggcaccccgtggtctaataggtgggactaagttcctcgcccccggtactcctgccagattctcaggctccctgcttggaggcaaggctgccctcaccctctcaggggtacagccagaggatgaggcagaatattactgtgctctatggtacagcaaccgctgggtgttcggtggaggaaccaaactgactgtccta

SEQ ID NO: 43 - protein, 249 aa, Artificial Sequence
  VH-VL-P of H2C
EVQLLESGGGLVQPGGSLKLSCAASGFTFNKYAMNWVRQAPGKGLEWVARIRSKYNNYATYYADSVKDRFTISRDDSKNTAYLQMNNLKTEDTAVYYCVRHGNFGNSYISYWAYWGQGTLVTVSSGGGGSGGGGSGGGGSELVVTQEPSLTVSPGGTVTLTCGSSTGAVTSGYYPNWVQQKPGQAPRGLIGGTKFLAPGTPARFSGSLLGGKAALTLSGVQPEDEAEYYCALWYSNRWVFGGGTKLTVL

SEQ ID NO: 44 - DNA, 747 bp, Artificial Sequence
  VH-VL-P of H2C
gaggtgcagctgctcgagtctggaggaggattggtgcagcctggagggtcattgaaactctcatgtgcagcctctggattcaccttcaataagtacgccatgaactgggtccgccaggctccaggaaagggtttggaatgggttgctcgcataagaagtaaatataataattatgcaacatattatgccgattcagtgaaagacaggttcaccatctccagagatgattcaaaaaacactgcctatctacaaatgaacaacttgaaaactgaggacactgccgtgtactactgtgtgagacatgggaacttcggtaatagctacatatcctactgggcttactggggccaagggactctggtcaccgtctcctcaggtggtggtggttctggcggcggcggctccggtggtggtggttctgagctcgttgtgactcaggaaccttcactcaccgtatcacctggtggaacagtcacactcacttgtggctcctcgactggggctgttacatctggctactacccaaactgggtccaacaaaaaccaggtcaggcaccccgtggtctaataggtgggactaagttcctcgcccccggtactcctgccagattctcaggctccctgcttggaggcaaggctgccctcaccctctcaggggtacagccagaggatgaggcagaatattactgtgctctatggtacagcaaccgctgggtgttcggtggaggaaccaaactgactgtccta

SEQ ID NO: 45 - protein, 14 aa, Artificial Sequence
  CDR-L1 of H1E
GSSTGAVTSGYYPN

SEQ ID NO: 46 - protein, 7 aa, Artificial Sequence
  CDR-L2 of H1E
GTKFLAP

SEQ ID NO: 47 - protein, 9 aa, Artificial Sequence
  CDR-L3 of H1E
ALWYSNRWV

SEQ ID NO: 48 - protein, 5 aa, Artificial Sequence
  CDR-H1 of H1E
SYAMN

SEQ ID NO: 49 - protein, 19 aa, Artificial Sequence
  CDR-H2 of H1E
RIRSKYNNYATYYADSVKG

SEQ ID NO: 50 - protein, 14 aa, Artificial Sequence
  CDR-H3 of H1E
HGNFGNSYLSFWAY

SEQ ID NO: 51 - protein, 125 aa, Artificial Sequence
  VH of H1E
EVQLVESGGGLEQPGGSLKLSCAASGFTFNSYAMNWVRQAPGKGLEWVARIRSKYNNYATYYADSVKGRFTISRDDSKNTAYLQMNNLKTEDTAVYYCVRHGNFGNSYLSFWAYWGQGTLVTVSS

SEQ ID NO: 52 - DNA, 374 bp, Artificial Sequence
  VH of H1E
gaggtgcagctggtcgagtctggaggaggattggagcagcctggagggtcattgaaactctcatgtgcagcctctggattcaccttcaattcgtacgccatgaactgggtccgccaggctccaggaaagggtttggaatgggttgctcgcataagaagtaaatataataattatgcaacatattatgccgattcagtgaaagggaggttcaccatctccagagatgattcaaaaaacactgcctatctacaaatgaacaacttgaaaactgaggacactgccgtgtactactgtgtgagacatgggaacttcggtaatagctacctatccttctgggcttactggggccaagggactctggtcaccgtctcctc

SEQ ID NO: 53 - protein, 109 aa, Artificial Sequence; identical to SEQ ID NO: 17
  VL of H1E

SEQ ID NO: 54 - DNA, 327 bp, Artificial Sequence; identical to SEQ ID NO: 18
  VL of H1E

SEQ ID NO: 55 - protein, 125 aa, Artificial Sequence
  VH-P of H1E
EVQLLESGGGLEQPGGSLKLSCAASGFTFNSYAMNWVRQAPGKGLEWVARIRSKYNNYATYYADSVKGRFTISRDDSKNTAYLQMNNLKTEDTAVYYCVRHGNFGNSYLSFWAYWGQGTLVTVSS

SEQ ID NO: 56 - DNA, 375 bp, Artificial Sequence
  VH-P of H1E
gaggtgcagctgctcgagtctggaggaggattggagcagcctggagggtcattgaaactctcatgtgcagcctctggattcaccttcaattcgtacgccatgaactgggtccgccaggctccaggaaagggtttggaatgggttgctcgcataagaagtaaatataataattatgcaacatattatgccgattcagtgaaagggaggttcaccatctccagagatgattcaaaaaacactgcctatctacaaatgaacaacttgaaaactgaggacactgccgtgtactactgtgtgagacatgggaacttcggtaatagctacctatccttctgggcttactggggccaagggactctggtcaccgtctcctca

SEQ ID NO: 57 - protein, 109 aa, Artificial Sequence; identical to SEQ ID NO: 21
  VL-P of H1E

SEQ ID NO: 58 - DNA, 327 bp, Artificial Sequence; identical to SEQ ID NO: 22
  VL-P of H1E

SEQ ID NO: 59 - protein, 249 aa, Artificial Sequence
  VH-VL of H1E
EVQLVESGGGLEQPGGSLKLSCAASGFTFNSYAMNWVRQAPGKGLEWVARIRSKYNNYATYYADSVKGRFTISRDDSKNTAYLQMNNLKTEDTAVYYCVRHGNFGNSYLSFWAYWGQGTLVTVSSGGGGSGGGGSGGGGSQTVVTQEPSLTVSPGGTVTLTCGSSTGAVTSGYYPNWVQQKPGQAPRGLIGGTKFLAPGTPARFSGSLLGGKAALTLSGVQPEDEAEYYCALWYSNRWVFGGGTKLTVL

SEQ ID NO: 60 - DNA, 747 bp, Artificial Sequence
  VH-VL of H1E
gaggtgcagctggtcgagtctggaggaggattggagcagcctggagggtcattgaaactctcatgtgcagcctctggattcaccttcaattcgtacgccatgaactgggtccgccaggctccaggaaagggtttggaatgggttgctcgcataagaagtaaatataataattatgcaacatattatgccgattcagtgaaagggaggttcaccatctccagagatgattcaaaaaacactgcctatctacaaatgaacaacttgaaaactgaggacactgccgtgtactactgtgtgagacatgggaacttcggtaatagctacctatccttctgggcttactggggccaagggactctggtcaccgtctcctcaggtggtggtggttctggcggcggcggctccggtggtggtggttctcagactgttgtgactcaggaaccttcactcaccgtatcacctggtggaacagtcacactcacttgtggctcctcgactggggctgttacatctggctactacccaaactgggtccaacaaaaaccaggtcaggcaccccgtggtctaataggtgggactaagttcctcgcccccggtactcctgccagattctcaggctccctgcttggaggcaaggctgccctcaccctctcaggggtacagccagaggatgaggcagaatattactgtgctctatggtacagcaaccgctgggtgttcggtggaggaaccaaactgactgtccta

SEQ ID NO: 61 - protein, 249 aa, Artificial Sequence
  VH-VL-P of H1E
EVQLLESGGGLEQPGGSLKLSCAASGFTFNSYAMNWVRQAPGKGLEWVARIRSKYNNYATYYADSVKGRFTISRDDSKNTAYLQMNNLKTEDTAVYYCVRHGNFGNSYLSFWAYWGQGTLVTVSSGGGGSGGGGSGGGGSELVVTQEPSLTVSPGGTVTLTCGSSTGAVTSGYYPNWVQQKPGQAPRGLIGGTKFLAPGTPARFSGSLLGGKAALTLSGVQPEDEAEYYCALWYSNRWVFGGGTKLTVL

SEQ ID NO: 62 - DNA, 747 bp, Artificial Sequence
  VH-VL-P of H1E
gaggtgcagctgctcgagtctggaggaggattggagcagcctggagggtcattgaaactctcatgtgcagcctctggattcaccttcaattcgtacgccatgaactgggtccgccaggctccaggaaagggtttggaatgggttgctcgcataagaagtaaatataataattatgcaacatattatgccgattcagtgaaagggaggttcaccatctccagagatgattcaaaaaacactgcctatctacaaatgaacaacttgaaaactgaggacactgccgtgtactactgtgtgagacatgggaacttcggtaatagctacctatccttctgggcttactggggccaagggactctggtcaccgtctcctcaggtggtggtggttctggcggcggcggctccggtggtggtggttctgagctcgttgtgactcaggaaccttcactcaccgtatcacctggtggaacagtcacactcacttgtggctcctcgactggggctgttacatctggctactacccaaactgggtccaacaaaaaccaggtcaggcaccccgtggtctaataggtgggactaagttcctcgcccccggtactcctgccagattctcaggctccctgcttggaggcaaggctgccctcaccctctcaggggtacagccagaggatgaggcagaatattactgtgctctatggtacagcaaccgctgggtgttcggtggaggaaccaaactgactgtccta

SEQ ID NO: 63 - protein, 14 aa, Artificial Sequence
  CDR-L1 of G4H
GSSTGAVTSGYYPN

SEQ ID NO: 64 - protein, 7 aa, Artificial Sequence
  CDR-L2 of G4H
GTKFLAP

SEQ ID NO: 65 - protein, 9 aa, Artificial Sequence
  CDR-L3 of G4H
ALWYSNRWV

SEQ ID NO: 66 - protein, 5 aa, Artificial Sequence
  CDR-H1 of G4H
RYAMN

SEQ ID NO: 67 - protein, 19 aa, Artificial Sequence
  CDR-H2 of G4H
RIRSKYNNYATYYADSVKG

SEQ ID NO: 68 - protein, 14 aa, Artificial Sequence
  CDR-H3 of G4H
HGNFGNSYLSYFAY

SEQ ID NO: 69 - protein, 125 aa, Artificial Sequence
  VH of G4H
EVQLVESGGGLVQPGGSLKLSCAASGFTFNRYAMNWVRQAPGKGLEWVARIRSKYNNYATYYADSVKGRFTISRDDSKNTAYLQMNNLKTEDTAVYYCVRHGNFGNSYLSYFAYWGQGTLVTVSS

SEQ ID NO: 70 - DNA, 375 bp, Artificial Sequence
  VH of G4H
gaggtgcagctggtcgagtctggaggaggattggtgcagcctggagggtcattgaaactctcatgtgcagcctctggattcaccttcaatcgctacgccatgaactgggtccgccaggctccaggaaagggtttggaatgggttgctcgcataagaagtaaatataataattatgcaacatattatgccgattcagtgaaagggaggttcaccatctccagagatgattcaaaaaacactgcctatctacaaatgaacaacttgaaaactgaggacactgccgtgtactactgtgtgagacatgggaacttcggtaatagctacttatcctacttcgcttactggggccaagggactctggtcaccgtctcctca

SEQ ID NO: 71 - protein, 109 aa, Artificial Sequence; identical to SEQ ID NO: 17
  VL of G4H

SEQ ID NO: 72 - DNA, 327 bp, Artificial Sequence; identical to SEQ ID NO: 18
  VL of G4H

SEQ ID NO: 73 - protein, 125 aa, Artificial Sequence
  VH-P of G4H
EVQLLESGGGLVQPGGSLKLSCAASGFTFNRYAMNWVRQAPGKGLEWVARIRSKYNNYATYYADSVKGRFTISRDDSKNTAYLQMNNLKTEDTAVYYCVRHGNFGNSYLSYFAYWGQGTLVTVSS

SEQ ID NO: 74 - DNA, 375 bp, Artificial Sequence
  VH-P of G4H
gaggtgcagctgctcgagtctggaggaggattggtgcagcctggagggtcattgaaactctcatgtgcagcctctggattcaccttcaatcgctacgccatgaactgggtccgccaggctccaggaaagggtttggaatgggttgctcgcataagaagtaaatataataattatgcaacatattatgccgattcagtgaaagggaggttcaccatctccagagatgattcaaaaaacactgcctatctacaaatgaacaacttgaaaactgaggacactgccgtgtactactgtgtgagacatgggaacttcggtaatagctacttatcctacttcgcttactggggccaagggactctggtcaccgtctcctca

SEQ ID NO: 75 - protein, 109 aa, Artificial Sequence; identical to SEQ ID NO: 21
  VL-P of G4H

SEQ ID NO: 76 - DNA, 327 bp, Artificial Sequence; identical to SEQ ID NO: 22
  VL-P of G4H

SEQ ID NO: 77 - protein, 249 aa, Artificial Sequence
  VH-VL of G4H
EVQLVESGGGLVQPGGSLKLSCAASGFTFNRYAMNWVRQAPGKGLEWVARIRSKYNNYATYYADSVKGRFTISRDDSKNTAYLQMNNLKTEDTAVYYCVRHGNFGNSYLSYFAYWGQGTLVTVSSGGGGSGGGGSGGGGSQTVVTQEPSLTVSPGGTVTLTCGSSTGAVTSGYYPNWVQQKPGQAPRGLIGGTKFLAPGTPARFSGSLLGGKAALTLSGVQPEDEAEYYCALWYSNRWVFGGGTKLTVL

SEQ ID NO: 78 - DNA, 747 bp, Artificial Sequence
  VH-VL of G4H
gaggtgcagctggtcgagtctggaggaggattggtgcagcctggagggtcattgaaactctcatgtgcagcctctggattcaccttcaatcgctacgccatgaactgggtccgccaggctccaggaaagggtttggaatgggttgctcgcataagaagtaaatataataattatgcaacatattatgccgattcagtgaaagggaggttcaccatctccagagatgattcaaaaaacactgcctatctacaaatgaacaacttgaaaactgaggacactgccgtgtactactgtgtgagacatgggaacttcggtaatagctacttatcctacttcgcttactggggccaagggactctggtcaccgtctcctcaggtggtggtggttctggcggcggcggctccggtggtggtggttctcagactgttgtgactcaggaaccttcactcaccgtatcacctggtggaacagtcacactcacttgtggctcctcgactggggctgttacatctggctactacccaaactgggtccaacaaaaaccaggtcaggcaccccgtggtctaataggtgggactaagttcctcgcccccggtactcctgccagattctcaggctccctgcttggaggcaaggctgccctcaccctctcaggggtacagccagaggatgaggcagaatattactgtgctctatggtacagcaaccgctgggtgttcggtggaggaaccaaactgactgtccta

SEQ ID NO: 79 - protein, 249 aa, Artificial Sequence
  VH-VL-P of G4H
EVQLLESGGGLVQPGGSLKLSCAASGFTFNRYAMNWVRQAPGKGLEWVARIRSKYNNYATYYADSVKGRFTISRDDSKNTAYLQMNNLKTEDTAVYYCVRHGNFGNSYLSYFAYWGQGTLVTVSSGGGGSGGGGSGGGGSELVVTQEPSLTVSPGGTVTLTCGSSTGAVTSGYYPNWVQQKPGQAPRGLIGGTKFLAPGTPARFSGSLLGGKAALTLSGVQPEDEAEYYCALWYSNRWVFGGGTKLTVL

SEQ ID NO: 80 - DNA, 747 bp, Artificial Sequence
  VH-VL-P of G4H
gaggtgcagctgctcgagtctggaggaggattggtgcagcctggagggtcattgaaactctcatgtgcagcctctggattcaccttcaatcgctacgccatgaactgggtccgccaggctccaggaaagggtttggaatgggttgctcgcataagaagtaaatataataattatgcaacatattatgccgattcagtgaaagggaggttcaccatctccagagatgattcaaaaaacactgcctatctacaaatgaacaacttgaaaactgaggacactgccgtgtactactgtgtgagacatgggaacttcggtaatagctacttatcctacttcgcttactggggccaagggactctggtcaccgtctcctcaggtggtggtggttctggcggcggcggctccggtggtggtggttctgagctcgttgtgactcaggaaccttcactcaccgtatcacctggtggaacagtcacactcacttgtggctcctcgactggggctgttacatctggctactacccaaactgggtccaacaaaaaccaggtcaggcaccccgtggtctaataggtgggactaagttcctcgcccccggtactcctgccagattctcaggctccctgcttggaggcaaggctgccctcaccctctcaggggtacagccagaggatgaggcagaatattactgtgctctatggtacagcaaccgctgggtgttcggtggaggaaccaaactgactgtccta

SEQ ID NO: 81 - protein, 14 aa, Artificial Sequence
  CDR-L1 of A2J
RSSTGAVTSGYYPN

SEQ ID NO: 82 - protein, 7 aa, Artificial Sequence
  CDR-L2 of A2J
ATDMRPS

SEQ ID NO: 83 - protein, 9 aa, Artificial Sequence
  CDR-L3 of A2J
ALWYSNRWV

SEQ ID NO: 84 - protein, 5 aa, Artificial Sequence
  CDR-H1 of A2J
VYAMN

SEQ ID NO: 85 - protein, 19 aa, Artificial Sequence
  CDR-H2 of A2J
RIRSKYNNYATYYADSVKK

SEQ ID NO: 86 - protein, 14 aa, Artificial Sequence
  CDR-H3 of A2J
HGNFGNSYLSWWAY

SEQ ID NO: 87 - protein, 125 aa, Artificial Sequence
  VH of A2J
EVQLVESGGGLVQPGGSLKLSCAASGFTFNVYAMNWVRQAPGKGLEWVARIRSKYNNYATYYADSVKKRFTISRDDSKNTAYLQMNNLKTEDTAVYYCVRHGNFGNSYLSWWAYWGQGTLVTVSS

SEQ ID NO: 88 - DNA, 375 bp, Artificial Sequence
  VH of A2J
gaggtgcagctggtcgagtctggaggaggattggtgcagcctggagggtcattgaaactctcatgtgcagcctctggattcaccttcaatgtctacgccatgaactgggtccgccaggctccaggaaagggtttggaatgggttgctcgcataagaagtaaatataataattatgcaacatattatgccgattcagtgaaaaagaggttcaccatctccagagatgattcaaaaaacactgcctatctacaaatgaacaacttgaaaactgaggacactgccgtgtactactgtgtgagacatgggaacttcggtaatagctacttatcctggtgggcttactggggccaagggactctggtcaccgtctcctca

SEQ ID NO: 89 - protein, 109 aa, Artificial Sequence
  VL of A2J
QTVVTQEPSLTVSPGGTVTLTCRSSTGAVTSGYYPNWVQQKPGQAPRGLIGATDMRPSGTPARFSGSLLGGKAALTLSGVQPEDEAEYYCALWYSNRWVFGGGTKLTVL

SEQ ID NO: 90 - DNA, 327 bp, Artificial Sequence
  VL of A2J
cagactgttgtgactcaggaaccttcactcaccgtatcacctggtggaacagtcacactcacttgtcgctcctcgactggggctgttacatctggctactacccaaactgggtccaacaaaaaccaggtcaggcaccccgtggtctaataggtgccactgacatgaggccctctggtactcctgccagattctcaggctccctgcttggaggcaaggctgccctcaccctctcaggggtacagccagaggatgaggcagaatattactgtgctctatggtacagcaaccgctgggtgttcggtggaggaaccaaactgactgtccta

SEQ ID NO: 91 - protein, 125 aa, Artificial Sequence
  VH-P of A2J
EVQLLESGGGLVQPGGSLKLSCAASGFTFNVYAMNWVRQAPGKGLEWVARIRSKYNNYATYYADSVKKRFTISRDDSKNTAYLQMNNLKTEDTAVYYCVRHGNFGNSYLSWWAYWGQGTLVTVSS

SEQ ID NO: 92 - DNA, 375 bp, Artificial Sequence
  VH-P of A2J
gaggtgcagctgctcgagtctggaggaggattggtgcagcctggagggtcattgaaactctcatgtgcagcctctggattcaccttcaatgtctacgccatgaactgggtccgccaggctccaggaaagggtttggaatgggttgctcgcataagaagtaaatataataattatgcaacatattatgccgattcagtgaaaaagaggttcaccatctccagagatgattcaaaaaacactgcctatctacaaatgaacaacttgaaaactgaggacactgccgtgtactactgtgtgagacatgggaacttcggtaatagctacttatcctggtgggcttactggggccaagggactctggtcaccgtctcctca

SEQ ID NO: 93 - protein, 109 aa, Artificial Sequence
  Artificial Sequence
ELVVTQEPSLTVSPGGTVTLTCRSSTGAVTSGYYPNWVQQKPGQAPRGLIGATDMRPSGTPARFSGSLLGGKAALTLSGVQPEDEAEYYCALWYSNRWVFGGGTKLTVL

SEQ ID NO: 94 - DNA, 327 bp, Artificial Sequence
  VL-P of A2J
gagctcgttgtgactcaggaaccttcactcaccgtatcacctggtggaacagtcacactcacttgtcgctcctcgactggggctgttacatctggctactacccaaactgggtccaacaaaaaccaggtcaggcaccccgtggtctaataggtgccactgacatgaggccctctggtactcctgccagattctcaggctccctgcttggaggcaaggctgccctcaccctctcaggggtacagccagaggatgaggcagaatattactgtgctctatggtacagcaaccgctgggtgttcggtggaggaaccaaactgactgtccta

SEQ ID NO: 95 - protein, 249 aa, Artificial Sequence
  VH-VL of A2J
EVQLVESGGGLVQPGGSLKLSCAASGFTFNVYAMNWVRQAPGKGLEWVARIRSKYNNYATYYADSVKKRFTISRDDSKNTAYLQMNNLKTEDTAVYYCVRHGNFGNSYLSWWAYWGQGTLVTVSSGGGGSGGGGSGGGGSQTVVTQEPSLTVSPGGTVTLTCRSSTGAVTSGYYPNWVQQKPGQAPRGLIGATDMRPSGTPARFSGSLLGGKAALTLSGVQPEDEAEYYCALWYSNRWVFGGGTKLTVL

SEQ ID NO: 96 - DNA, 747 bp, Artificial Sequence
  VH-VL of A2J
gaggtgcagctggtcgagtctggaggaggattggtgcagcctggagggtcattgaaactctcatgtgcagcctctggattcaccttcaatgtctacgccatgaactgggtccgccaggctccaggaaagggtttggaatgggttgctcgcataagaagtaaatataataattatgcaacatattatgccgattcagtgaaaaagaggttcaccatctccagagatgattcaaaaaacactgcctatctacaaatgaacaacttgaaaactgaggacactgccgtgtactactgtgtgagacatgggaacttcggtaatagctacttatcctggtgggcttactggggccaagggactctggtcaccgtctcctcaggtggtggtggttctggcggcggcggctccggtggtggtggttctcagactgttgtgactcaggaaccttcactcaccgtatcacctggtggaacagtcacactcacttgtcgctcctcgactggggctgttacatctggctactacccaaactgggtccaacaaaaaccaggtcaggcaccccgtggtctaataggtgccactgacatgaggccctctggtactcctgccagattctcaggctccctgcttggaggcaaggctgccctcaccctctcaggggtacagccagaggatgaggcagaatattactgtgctctatggtacagcaaccgctgggtgttcggtggaggaaccaaactgactgtccta

SEQ ID NO: 97 - protein, 249 aa, Artificial Sequence
  VH-VL-P of A2J
EVQLLESGGGLVQPGGSLKLSCAASGFTFNVYAMNWVRQAPGKGLEWVARIRSKYNNYATYYADSVKKRFTISRDDSKNTAYLQMNNLKTEDTAVYYCVRHGNFGNSYLSWWAYWGQGTLVTVSSGGGGSGGGGSGGGGSELVVTQEPSLTVSPGGTVTLTCRSSTGAVTSGYYPNWVQQKPGQAPRGLIGATDMRPSGTPARFSGSLLGGKAALTLSGVQPEDEAEYYCALWYSNRWVFGGGTKLTVL

SEQ ID NO: 98 - DNA, 747 bp, Artificial Sequence
  VH-VL-P of A2J
gaggtgcagctgctcgagtctggaggaggattggtgcagcctggagggtcattgaaactctcatgtgcagcctctggattcaccttcaatgtctacgccatgaactgggtccgccaggctccaggaaagggtttggaatgggttgctcgcataagaagtaaatataataattatgcaacatattatgccgattcagtgaaaaagaggttcaccatctccagagatgattcaaaaaacactgcctatctacaaatgaacaacttgaaaactgaggacactgccgtgtactactgtgtgagacatgggaacttcggtaatagctacttatcctggtgggcttactggggccaagggactctggtcaccgtctcctcaggtggtggtggttctggcggcggcggctccggtggtggtggttctgagctcgttgtgactcaggaaccttcactcaccgtatcacctggtggaacagtcacactcacttgtcgctcctcgactggggctgttacatctggctactacccaaactgggtccaacaaaaaccaggtcaggcaccccgtggtctaataggtgccactgacatgaggccctctggtactcctgccagattctcaggctccctgcttggaggcaaggctgccctcaccctctcaggggtacagccagaggatgaggcagaatattactgtgctctatggtacagcaaccgctgggtgttcggtggaggaaccaaactgactgtccta

SEQ ID NO: 99 - protein, 14 aa, Artificial Sequence
  CDR-L1 of E1L
GSSTGAVTSGYYPN

SEQ ID NO: 100 - protein, 7 aa, Artificial Sequence
  CDR-L2 of E1L
GTKFLAP

SEQ ID NO: 101 - protein, 9 aa, Artificial Sequence
  CDR-L3 of E1L
ALWYSNRWV

SEQ ID NO: 102 - protein, 5 aa, Artificial Sequence
  CDR-H1 of E1L
KYAMN

SEQ ID NO: 103 - protein, 19 aa, Artificial Sequence
  CDR-H2 of E1L
RIRSKYNNYATYYADSVKS

SEQ ID NO: 104 - protein, 14 aa, Artificial Sequence
  CDR-H3 of E1L
HGNFGNSYTSYYAY

SEQ ID NO: 105 - protein, 125 aa, Artificial Sequence
  VH of E1L
EVQLVESGGGLVQPGGSLKLSCAASGFTFNKYAMNWVRQAPGKGLEWVARIRSKYNNYATYYADSVKSRFTISRDDSKNTAYLQMNNLKTEDTAVYYCVRHGNFGNSYTSYYAYWGQGTLVTVSS

SEQ ID NO: 106 - DNA, 375 bp, Artificial Sequence
  VH of E1L
gaggtgcagctggtcgagtctggaggaggattggtgcagcctggagggtcattgaaactctcatgtgcagcctctggattcaccttcaataagtacgccatgaactgggtccgccaggctccaggaaagggtttggaatgggttgctcgcataagaagtaaatataataattatgcaacatattatgccgattcagtgaaatcgaggttcaccatctccagagatgattcaaaaaacactgcctatctacaaatgaacaacttgaaaactgaggacactgccgtgtactactgtgtgagacatgggaacttcggtaatagctacacatcctactacgcttactggggccaagggactctggtcaccgtctcctca

SEQ ID NO: 107 - protein, 109 aa, Artificial Sequence; identical to SEQ ID NO: 17
  VL of E1L

SEQ ID NO: 108 - DNA, 327 bp, Artificial Sequence; identical to SEQ ID NO: 18
  VL of E1L

SEQ ID NO: 109 - protein, 125 aa, Artificial Sequence
  VH-P of E1L
EVQLLESGGGLVQPGGSLKLSCAASGFTFNKYAMNWVRQAPGKGLEWVARIRSKYNNYATYYADSVKSRFTISRDDSKNTAYLQMNNLKTEDTAVYYCVRHGNFGNSYTSYYAYWGQGTLVTVSS

SEQ ID NO: 110 - DNA, 375 bp, Artificial Sequence
  VH-P of E1L
gaggtgcagctgctcgagtctggaggaggattggtgcagcctggagggtcattgaaactctcatgtgcagcctctggattcaccttcaataagtacgccatgaactgggtccgccaggctccaggaaagggtttggaatgggttgctcgcataagaagtaaatataataattatgcaacatattatgccgattcagtgaaatcgaggttcaccatctccagagatgattcaaaaaacactgcctatctacaaatgaacaacttgaaaactgaggacactgccgtgtactactgtgtgagacatgggaacttcggtaatagctacacatcctactacgcttactggggccaagggactctggtcaccgtctcctca

SEQ ID NO: 111 - protein, 109 aa, Artificial Sequence; identical to SEQ ID NO: 21
  VL-P of E1L

SEQ ID NO: 112 - DNA, 327 bp, Artificial Sequence; identical to SEQ ID NO: 22
  VL-P of E1L

SEQ ID NO: 113 - protein, 249 aa, Artificial Sequence
  VH-VL of E1L
EVQLVESGGGLVQPGGSLKLSCAASGFTFNKYAMNWVRQAPGKGLEWVARIRSKYNNYATYYADSVKSRFTISRDDSKNTAYLQMNNLKTEDTAVYYCVRHGNFGNSYTSYYAYWGQGTLVTVSSGGGGSGGGGSGGGGSQTVVTQEPSLTVSPGGTVTLTCGSSTGAVTSGYYPNWVQQKPGQAPRGLIGGTKFLAPGTPARFSGSLLGGKAALTLSGVQPEDEAEYYCALWYSNRWVFGGGTKLTVL

SEQ ID NO: 114 - DNA, 747 bp, Artificial Sequence
  VH-VL of E1L
gaggtgcagctggtcgagtctggaggaggattggtgcagcctggagggtcattgaaactctcatgtgcagcctctggattcaccttcaataagtacgccatgaactgggtccgccaggctccaggaaagggtttggaatgggttgctcgcataagaagtaaatataataattatgcaacatattatgccgattcagtgaaatcgaggttcaccatctccagagatgattcaaaaaacactgcctatctacaaatgaacaacttgaaaactgaggacactgccgtgtactactgtgtgagacatgggaacttcggtaatagctacacatcctactacgcttactggggccaagggactctggtcaccgtctcctcaggtggtggtggttctggcggcggcggctccggtggtggtggttctcagactgttgtgactcaggaaccttcactcaccgtatcacctggtggaacagtcacactcacttgtggctcctcgactggggctgttacatctggctactacccaaactgggtccaacaaaaaccaggtcaggcaccccgtggtctaataggtgggactaagttcctcgcccccggtactcctgccagattctcaggctccctgcttggaggcaaggctgccctcaccctctcaggggtacagccagaggatgaggcagaatattactgtgctctatggtacagcaaccgctgggtgttcggtggaggaaccaaactgactgtccta

SEQ ID NO: 115 - protein, 249 aa, Artificial Sequence
  VH-VL-P of E1L
EVQLLESGGGLVQPGGSLKLSCAASGFTFNKYAMNWVRQAPGKGLEWVARIRSKYNNYATYYADSVKSRFTISRDDSKNTAYLQMNNLKTEDTAVYYCVRHGNFGNSYTSYYAYWGQGTLVTVSSGGGGSGGGGSGGGGSELVVTQEPSLTVSPGGTVTLTCGSSTGAVTSGYYPNWVQQKPGQAPRGLIGGTKFLAPGTPARFSGSLLGGKAALTLSGVQPEDEAEYYCALWYSNRWVFGGGTKLTVL

SEQ ID NO: 116 - DNA, 747 bp, Artificial Sequence
  VH-VL-P of E1L
gaggtgcagctgctcgagtctggaggaggattggtgcagcctggagggtcattgaaactctcatgtgcagcctctggattcaccttcaataagtacgccatgaactgggtccgccaggctccaggaaagggtttggaatgggttgctcgcataagaagtaaatataataattatgcaacatattatgccgattcagtgaaatcgaggttcaccatctccagagatgattcaaaaaacactgcctatctacaaatgaacaacttgaaaactgaggacactgccgtgtactactgtgtgagacatgggaacttcggtaatagctacacatcctactacgcttactggggccaagggactctggtcaccgtctcctcaggtggtggtggttctggcggcggcggctccggtggtggtggttctgagctcgttgtgactcaggaaccttcactcaccgtatcacctggtggaacagtcacactcacttgtggctcctcgactggggctgttacatctggctactacccaaactgggtccaacaaaaaccaggtcaggcaccccgtggtctaataggtgggactaagttcctcgcccccggtactcctgccagattctcaggctccctgcttggaggcaaggctgccctcaccctctcaggggtacagccagaggatgaggcagaatattactgtgctctatggtacagcaaccgctgggtgttcggtggaggaaccaaactgactgtccta

SEQ ID NO: 117 - protein, 14 aa, Artificial Sequence
  CDR-L1 of E2M
RSSTGAVTSGYYPN

SEQ ID NO: 118 - protein, 7 aa, Artificial Sequence
  CDR-L2 of E2M
ATDMRPS

SEQ ID NO: 119 - protein, 9 aa, Artificial Sequence
  CDR-L3 of E2M
ALWYSNRWV

SEQ ID NO: 120 - protein, 5 aa, Artificial Sequence
  CDR-H1 of E2M
GYAMN

SEQ ID NO: 121 - protein, 19 aa, Artificial Sequence
  CDR-H2 of E2M
RIRSKYNNYATYYADSVKE

SEQ ID NO: 122 - protein, 14 aa, Artificial Sequence
  CDR-H3 of E2M
HRNFGNSYLSWFAY

SEQ ID NO: 123 - protein, 125 aa, Artificial Sequence
  VH of E2M
EVQLVESGGGLVQPGGSLKLSCAASGFTFNGYAMNWVRQAPGKGLEWVARIRSKYNNYATYYADSVKERFTISRDDSKNTAYLQMNNLKTEDTAVYYCVRHRNFGNSYLSWFAYWGQGTLVTVSS

SEQ ID NO: 124 - DNA, 375 bp, Artificial Sequence
  VH of E2M
gaggtgcagctggtcgagtctggaggaggattggtgcagcctggagggtcattgaaactctcatgtgcagcctctggattcaccttcaatggctacgccatgaactgggtccgccaggctccaggaaagggtttggaatgggttgctcgcataagaagtaaatataataattatgcaacatattatgccgattcagtgaaagagaggttcaccatctccagagatgattcaaaaaacactgcctatctacaaatgaacaacttgaaaactgaggacactgccgtgtactactgtgtgagacataggaacttcggtaatagctacttatcctggttcgcttactggggccaagggactctggtcaccgtctcctca

SEQ ID NO: 125 - protein, 109 aa, Artificial Sequence; identical to SEQ ID NO: 89
  VL of E2M

SEQ ID NO: 126 - DNA, 327 bp, Artificial Sequence; identical to SEQ ID NO: 90
  VL of E2M

SEQ ID NO: 127 - protein, 125 aa, Artificial Sequence
  VH-P of E2M
EVQLLESGGGLVQPGGSLKLSCAASGFTFNGYAMNWVRQAPGKGLEWVARIRSKYNNYATYYADSVKERFTISRDDSKNTAYLQMNNLKTEDTAVYYCVRHRNFGNSYLSWFAYWGQGTLVTVSS

SEQ ID NO: 128 - DNA, 375 bp, Artificial Sequence
  VH-P of E2M
gaggtgcagctgctcgagtctggaggaggattggtgcagcctggagggtcattgaaactctcatgtgcagcctctggattcaccttcaatggctacgccatgaactgggtccgccaggctccaggaaagggtttggaatgggttgctcgcataagaagtaaatataataattatgcaacatattatgccgattcagtgaaagagaggttcaccatctccagagatgattcaaaaaacactgcctatctacaaatgaacaacttgaaaactgaggacactgccgtgtactactgtgtgagacataggaacttcggtaatagctacttatcctggttcgcttactggggccaagggactctggtcaccgtctcctca

SEQ ID NO: 129 - protein, 109 aa, Artificial Sequence; identical to SEQ ID NO: 93
  VL-P of E2M

SEQ ID NO: 130 - DNA, 327 bp, Artificial Sequence; identical to SEQ ID NO: 94
  VL-P of E2M

SEQ ID NO: 131 - protein, 249 aa, Artificial Sequence
  VH-VL of E2M
EVQLVESGGGLVQPGGSLKLSCAASGFTFNGYAMNWVRQAPGKGLEWVARIRSKYNNYATYYADSVKERFTISRDDSKNTAYLQMNNLKTEDTAVYYCVRHRNFGNSYLSWFAYWGQGTLVTVSSGGGGSGGGGSGGGGSQTVVTQEPSLTVSPGGTVTLTCRSSTGAVTSGYYPNWVQQKPGQAPRGLIGATDMRPSGTPARFSGSLLGGKAALTLSGVQPEDEAEYYCALWYSNRWVFGGGTKLTVL

SEQ ID NO: 132 - DNA, 747 bp, Artificial Sequence
  VH-VL of E2M
gaggtgcagctggtcgagtctggaggaggattggtgcagcctggagggtcattgaaactctcatgtgcagcctctggattcaccttcaatggctacgccatgaactgggtccgccaggctccaggaaagggtttggaatgggttgctcgcataagaagtaaatataataattatgcaacatattatgccgattcagtgaaagagaggttcaccatctccagagatgattcaaaaaacactgcctatctacaaatgaacaacttgaaaactgaggacactgccgtgtactactgtgtgagacataggaacttcggtaatagctacttatcctggttcgcttactggggccaagggactctggtcaccgtctcctcaggtggtggtggttctggcggcggcggctccggtggtggtggttctcagactgttgtgactcaggaaccttcactcaccgtatcacctggtggaacagtcacactcacttgtcgctcctcgactggggctgttacatctggctactacccaaactgggtccaacaaaaaccaggtcaggcaccccgtggtctaataggtgccactgacatgaggccctctggtactcctgccagattctcaggctccctgcttggaggcaaggctgccctcaccctctcaggggtacagccagaggatgaggcagaatattactgtgctctatggtacagcaaccgctgggtgttcggtggaggaaccaaactgactgtccta

SEQ ID NO: 133 - protein, 249 aa, Artificial Sequence
  VH-VL-P of E2M
EVQLLESGGGLVQPGGSLKLSCAASGFTFNGYAMNWVRQAPGKGLEWVARIRSKYNNYATYYADSVKERFTISRDDSKNTAYLQMNNLKTEDTAVYYCVRHRNFGNSYLSWFAYWGQGTLVTVSSGGGGSGGGGSGGGGSELVVTQEPSLTVSPGGTVTLTCRSSTGAVTSGYYPNWVQQKPGQAPRGLIGATDMRPSGTPARFSGSLLGGKAALTLSGVQPEDEAEYYCALWYSNRWVFGGGTKLTVL

SEQ ID NO: 134 - DNA, 747 bp, Artificial Sequence
  VH-VL-P of E2M
gaggtgcagctgctcgagtctggaggaggattggtgcagcctggagggtcattgaaactctcatgtgcagcctctggattcaccttcaatggctacgccatgaactgggtccgccaggctccaggaaagggtttggaatgggttgctcgcataagaagtaaatataataattatgcaacatattatgccgattcagtgaaagagaggttcaccatctccagagatgattcaaaaaacactgcctatctacaaatgaacaacttgaaaactgaggacactgccgtgtactactgtgtgagacataggaacttcggtaatagctacttatcctggttcgcttactggggccaagggactctggtcaccgtctcctcaggtggtggtggttctggcggcggcggctccggtggtggtggttctgagctcgttgtgactcaggaaccttcactcaccgtatcacctggtggaacagtcacactcacttgtcgctcctcgactggggctgttacatctggctactacccaaactgggtccaacaaaaaccaggtcaggcaccccgtggtctaataggtgccactgacatgaggccctctggtactcctgccagattctcaggctccctgcttggaggcaaggctgccctcaccctctcaggggtacagccagaggatgaggcagaatattactgtgctctatggtacagcaaccgctgggtgttcggtggaggaaccaaactgactgtccta

SEQ ID NO: 135 - protein, 14 aa, Artificial Sequence
  CDR-L1 of F7O
GSSTGAVTSGYYPN

SEQ ID NO: 136 - protein, 7 aa, Artificial Sequence
  CDR-L2 of F7O
GTKFLAP

SEQ ID NO: 137 - protein, 9 aa, Artificial Sequence
  CDR-L3 of F7O
ALWYSNRWV

SEQ ID NO: 138 - protein, 5 aa, Artificial Sequence
  CDR-H1 of F7O
VYAMN

SEQ ID NO: 139 - protein, 19 aa, Artificial Sequence
  CDR-H2 of F7O
RIRSKYNNYATYYADSVKK

SEQ ID NO: 140 - protein, 14 aa, Artificial Sequence
  CDR-H3 of F7O
HGNFGNSYISWWAY

SEQ ID NO: 141 - protein, 125 aa, Artificial Sequence
  VH of F7O
EVQLVESGGGLVQPGGSLKLSCAASGFTFNVYAMNWVRQAPGKGLEWVARIRSKYNNYATYYADSVKKRFTISRDDSKNTAYLQMNNLKTEDTAVYYCVRHGNFGNSYISWWAYWGQGTLVTVSS

SEQ ID NO: 142 - DNA, 375 bp, Artificial Sequence
  VH of F7O
gaggtgcagctggtcgagtctggaggaggattggtgcagcctggagggtcattgaaactctcatgtgcagcctctggattcaccttcaatgtgtacgccatgaactgggtccgccaggctccaggaaagggtttggaatgggttgctcgcataagaagtaaatataataattatgcaacatattatgccgattcagtgaaaaagaggttcaccatctccagagatgattcaaaaaacactgcctatctacaaatgaacaacttgaaaactgaggacactgccgtgtactactgtgtgagacatgggaacttcggtaatagctacatatcctggtgggcttactggggccaagggactctggtcaccgtctcctca

SEQ ID NO: 143 - protein, 109 aa, Artificial Sequence; identical to SEQ ID NO: 17
  VL of F7O

SEQ ID NO: 144 - DNA, 327 bp, Artificial Sequence; identical to SEQ ID NO: 18
  VL of F7O

SEQ ID NO: 145 - protein, 125 aa, Artificial Sequence
  VH-P of F7O
EVQLLESGGGLVQPGGSLKLSCAASGFTFNVYAMNWVRQAPGKGLEWVARIRSKYNNYATYYADSVKKRFTISRDDSKNTAYLQMNNLKTEDTAVYYCVRHGNFGNSYISWWAYWGQGTLVTVSS

SEQ ID NO: 146 - DNA, 375 bp, Artificial Sequence
  VH-P of F7O
gaggtgcagctgctcgagtctggaggaggattggtgcagcctggagggtcattgaaactctcatgtgcagcctctggattcaccttcaatgtgtacgccatgaactgggtccgccaggctccaggaaagggtttggaatgggttgctcgcataagaagtaaatataataattatgcaacatattatgccgattcagtgaaaaagaggttcaccatctccagagatgattcaaaaaacactgcctatctacaaatgaacaacttgaaaactgaggacactgccgtgtactactgtgtgagacatgggaacttcggtaatagctacatatcctggtgggcttactggggccaagggactctggtcaccgtctcctca

SEQ ID NO: 147 - protein, 109 aa, Artificial Sequence; identical to SEQ ID NO: 21
  VL-P of F7O

SEQ ID NO: 148 - DNA, 327 bp, Artificial Sequence; identical to SEQ ID NO: 22
  VL-P of F7O

SEQ ID NO: 149 - protein, 249 aa, Artificial Sequence
  VH-VL of F7O
EVQLVESGGGLVQPGGSLKLSCAASGFTFNVYAMNWVRQAPGKGLEWVARIRSKYNNYATYYADSVKKRFTISRDDSKNTAYLQMNNLKTEDTAVYYCVRHGNFGNSYISWWAYWGQGTLVTVSSGGGGSGGGGSGGGGSQTVVTQEPSLTVSPGGTVTLTCGSSTGAVTSGYYPNWVQQKPGQAPRGLIGGTKFLAPGTPARFSGSLLGGKAALTLSGVQPEDEAEYYCALWYSNRWVFGGGTKLTVL

SEQ ID NO: 150 - DNA, 747 bp, Artificial Sequence
  VH-VL of F7O
gaggtgcagctggtcgagtctggaggaggattggtgcagcctggagggtcattgaaactctcatgtgcagcctctggattcaccttcaatgtgtacgccatgaactgggtccgccaggctccaggaaagggtttggaatgggttgctcgcataagaagtaaatataataattatgcaacatattatgccgattcagtgaaaaagaggttcaccatctccagagatgattcaaaaaacactgcctatctacaaatgaacaacttgaaaactgaggacactgccgtgtactactgtgtgagacatgggaacttcggtaatagctacatatcctggtgggcttactggggccaagggactctggtcaccgtctcctcaggtggtggtggttctggcggcggcggctccggtggtggtggttctcagactgttgtgactcaggaaccttcactcaccgtatcacctggtggaacagtcacactcacttgtggctcctcgactggggctgttacatctggctactacccaaactgggtccaacaaaaaccaggtcaggcaccccgtggtctaataggtgggactaagttcctcgcccccggtactcctgccagattctcaggctccctgcttggaggcaaggctgccctcaccctctcaggggtacagccagaggatgaggcagaatattactgtgctctatggtacagcaaccgctgggtgttcggtggaggaaccaaactgactgtccta

SEQ ID NO: 151 - protein, 249 aa, Artificial Sequence
  VH-VL-P of F7O
EVQLLESGGGLVQPGGSLKLSCAASGFTFNVYAMNWVRQAPGKGLEWVARIRSKYNNYATYYADSVKKRFTISRDDSKNTAYLQMNNLKTEDTAVYYCVRHGNFGNSYISWWAYWGQGTLVTVSSGGGGSGGGGSGGGGSELVVTQEPSLTVSPGGTVTLTCGSSTGAVTSGYYPNWVQQKPGQAPRGLIGGTKFLAPGTPARFSGSLLGGKAALTLSGVQPEDEAEYYCALWYSNRWVFGGGTKLTVL

SEQ ID NO: 152 - DNA, 747 bp, Artificial Sequence
  VH-VL-P of F7O
gaggtgcagctgctcgagtctggaggaggattggtgcagcctggagggtcattgaaactctcatgtgcagcctctggattcaccttcaatgtgtacgccatgaactgggtccgccaggctccaggaaagggtttggaatgggttgctcgcataagaagtaaatataataattatgcaacatattatgccgattcagtgaaaaagaggttcaccatctccagagatgattcaaaaaacactgcctatctacaaatgaacaacttgaaaactgaggacactgccgtgtactactgtgtgagacatgggaacttcggtaatagctacatatcctggtgggcttactggggccaagggactctggtcaccgtctcctcaggtggtggtggttctggcggcggcggctccggtggtggtggttctgagctcgttgtgactcaggaaccttcactcaccgtatcacctggtggaacagtcacactcacttgtggctcctcgactggggctgttacatctggctactacccaaactgggtccaacaaaaaccaggtcaggcaccccgtggtctaataggtgggactaagttcctcgcccccggtactcctgccagattctcaggctccctgcttggaggcaaggctgccctcaccctctcaggggtacagccagaggatgaggcagaatattactgtgctctatggtacagcaaccgctgggtgttcggtggaggaaccaaactgactgtccta

SEQ ID NO: 153 - protein, 14 aa, Artificial Sequence
  CDR-L1 of F12Q
GSSTGAVTSGNYPN

SEQ ID NO: 154 - protein, 7 aa, Artificial Sequence
  CDR-L2 of F12Q
GTKFLAP

SEQ ID NO: 155 - protein, 9 aa, Artificial Sequence
  CDR-L3 of F12Q
VLWYSNRWV

SEQ ID NO: 156 - protein, 5 aa, Artificial Sequence
  CDR-H1 of F12Q
SYAMN

SEQ ID NO: 157 - protein, 19 aa, Artificial Sequence
  CDR-H2 of F12Q
RIRSKYNNYATYYADSVKG

SEQ ID NO: 158 - protein, 14 aa, Artificial Sequence
  CDR-H3 of F12Q
HGNFGNSYVSWWAY

SEQ ID NO: 159 - protein, 125 aa, Artificial Sequence
  VH of F12Q
EVQLVESGGGLVQPGGSLKLSCAASGFTFNSYAMNWVRQAPGKGLEWVARIRSKYNNYATYYADSVKGRFTISRDDSKNTAYLQMNNLKTEDTAVYYCVRHGNFGNSYVSWWAYWGQGTLVTVSS

SEQ ID NO: 160 - DNA, 375 bp, Artificial Sequence
  VH of F12Q
gaggtgcagctggtcgagtctggaggaggattggtgcagcctggagggtcattgaaactctcatgtgcagcctctggattcaccttcaatagctacgccatgaactgggtccgccaggctccaggaaagggtttggaatgggttgctcgcataagaagtaaatataataattatgcaacatattatgccgattcagtgaaaggcaggttcaccatctccagagatgattcaaaaaacactgcctatctacaaatgaacaacttgaaaactgaggacactgccgtgtactactgtgtgagacatgggaacttcggtaatagctacgtttcctggtgggcttactggggccaagggactctggtcaccgtctcctca

SEQ ID NO: 161 - protein, 109 aa, Artificial Sequence
  VL of F12Q
QTVVTQEPSLTVSPGGTVTLTCGSSTGAVTSGNYPNWVQQKPGQAPRGLIGGTKFLAPGTPARFSGSLLGGKAALTLSGVQPEDEAEYYCVLWYSNRWVFGGGTKLTVL

SEQ ID NO: 162 - DNA, 327 bp, Artificial Sequence
  VL of F12Q
cagactgttgtgactcaggaaccttcactcaccgtatcacctggtggaacagtcacactcacttgtggctcctcgactggggctgttacatctggcaactacccaaactgggtccaacaaaaaccaggtcaggcaccccgtggtctaataggtgggactaagttcctcgcccccggtactcctgccagattctcaggctccctgcttggaggcaaggctgccctcaccctctcaggggtacagccagaggatgaggcagaatattactgtgttctatggtacagcaaccgctgggtgttcggtggaggaaccaaactgactgtccta

SEQ ID NO: 163 - protein, 125 aa, Artificial Sequence
  VH-P of F12Q
EVQLLESGGGLVQPGGSLKLSCAASGFTFNSYAMNWVRQAPGKGLEWVARIRSKYNNYATYYADSVKGRFTISRDDSKNTAYLQMNNLKTEDTAVYYCVRHGNFGNSYVSWWAYWGQGTLVTVSS

SEQ ID NO: 164 - DNA, 375 bp, Artificial Sequence
  VH-P of F12Q
gaggtgcagctgctcgagtctggaggaggattggtgcagcctggagggtcattgaaactctcatgtgcagcctctggattcaccttcaatagctacgccatgaactgggtccgccaggctccaggaaagggtttggaatgggttgctcgcataagaagtaaatataataattatgcaacatattatgccgattcagtgaaaggcaggttcaccatctccagagatgattcaaaaaacactgcctatctacaaatgaacaacttgaaaactgaggacactgccgtgtactactgtgtgagacatgggaacttcggtaatagctacgtttcctggtgggcttactggggccaagggactctggtcaccgtctcctca

SEQ ID NO: 165 - protein, 109 aa, Artificial Sequence
  VL-P of F12Q
ELVVTQEPSLTVSPGGTVTLTCGSSTGAVTSGNYPNWVQQKPGQAPRGLIGGTKFLAPGTPARFSGSLLGGKAALTLSGVQPEDEAEYYCVLWYSNRWVFGGGTKLTVL

SEQ ID NO: 166 - DNA, 327 bp, Artificial Sequence
  VL-P of F12Q
gagctcgttgtgactcaggaaccttcactcaccgtatcacctggtggaacagtcacactcacttgtggctcctcgactggggctgttacatctggcaactacccaaactgggtccaacaaaaaccaggtcaggcaccccgtggtctaataggtgggactaagttcctcgcccccggtactcctgccagattctcaggctccctgcttggaggcaaggctgccctcaccctctcaggggtacagccagaggatgaggcagaatattactgtgttctatggtacagcaaccgctgggtgttcggtggaggaaccaaactgactgtccta

SEQ ID NO: 167 - protein, 249 aa, Artificial Sequence
  VH-VL of F12Q
EVQLVESGGGLVQPGGSLKLSCAASGFTFNSYAMNWVRQAPGKGLEWVARIRSKYNNYATYYADSVKGRFTISRDDSKNTAYLQMNNLKTEDTAVYYCVRHGNFGNSYVSWWAYWGQGTLVTVSSGGGGSGGGGSGGGGSQTVVTQEPSLTVSPGGTVTLTCGSSTGAVTSGNYPNWVQQKPGQAPRGLIGGTKFLAPGTPARFSGSLLGGKAALTLSGVQPEDEAEYYCVLWYSNRWVFGGGTKLTVL

SEQ ID NO: 168 - DNA, 747 bp, Artificial Sequence
  VH-VL of F12Q
gaggtgcagctggtcgagtctggaggaggattggtgcagcctggagggtcattgaaactctcatgtgcagcctctggattcaccttcaatagctacgccatgaactgggtccgccaggctccaggaaagggtttggaatgggttgctcgcataagaagtaaatataataattatgcaacatattatgccgattcagtgaaaggcaggttcaccatctccagagatgattcaaaaaacactgcctatctacaaatgaacaacttgaaaactgaggacactgccgtgtactactgtgtgagacatgggaacttcggtaatagctacgtttcctggtgggcttactggggccaagggactctggtcaccgtctcctcaggtggtggtggttctggcggcggcggctccggtggtggtggttctcagactgttgtgactcaggaaccttcactcaccgtatcacctggtggaacagtcacactcacttgtggctcctcgactggggctgttacatctggcaactacccaaactgggtccaacaaaaaccaggtcaggcaccccgtggtctaataggtgggactaagttcctcgcccccggtactcctgccagattctcaggctccctgcttggaggcaaggctgccctcaccctctcaggggtacagccagaggatgaggcagaatattactgtgttctatggtacagcaaccgctgggtgttcggtggaggaaccaaactgactgtccta

SEQ ID NO: 169 - protein, 249 aa, Artificial Sequence
  VH-VL-P of F12Q
EVQLLESGGGLVQPGGSLKLSCAASGFTFNSYAMNWVRQAPGKGLEWVARIRSKYNNYATYYADSVKGRFTISRDDSKNTAYLQMNNLKTEDTAVYYCVRHGNFGNSYVSWWAYWGQGTLVTVSSGGGGSGGGGSGGGGSELVVTQEPSLTVSPGGTVTLTCGSSTGAVTSGNYPNWVQQKPGQAPRGLIGGTKFLAPGTPARFSGSLLGGKAALTLSGVQPEDEAEYYCVLWYSNRWVFGGGTKLTVL

SEQ ID NO: 170 - DNA, 747 bp, Artificial Sequence
  VH-VL-P of F12Q
gaggtgcagctgctcgagtctggaggaggattggtgcagcctggagggtcattgaaactctcatgtgcagcctctggattcaccttcaatagctacgccatgaactgggtccgccaggctccaggaaagggtttggaatgggttgctcgcataagaagtaaatataataattatgcaacatattatgccgattcagtgaaaggcaggttcaccatctccagagatgattcaaaaaacactgcctatctacaaatgaacaacttgaaaactgaggacactgccgtgtactactgtgtgagacatgggaacttcggtaatagctacgtttcctggtgggcttactggggccaagggactctggtcaccgtctcctcaggtggtggtggttctggcggcggcggctccggtggtggtggttctgagctcgttgtgactcaggaaccttcactcaccgtatcacctggtggaacagtcacactcacttgtggctcctcgactggggctgttacatctggcaactacccaaactgggtccaacaaaaaccaggtcaggcaccccgtggtctaataggtgggactaagttcctcgcccccggtactcctgccagattctcaggctccctgcttggaggcaaggctgccctcaccctctcaggggtacagccagaggatgaggcagaatattactgtgttctatggtacagcaaccgctgggtgttcggtggaggaaccaaactgactgtccta

SEQ ID NO: 171 - protein, 14 aa, Artificial Sequence
  CDR-L1 of I2C
GSSTGAVTSGNYPN

SEQ ID NO: 172 - protein, 7 aa, Artificial Sequence
  CDR-L2 of I2C
GTKFLAP

SEQ ID NO: 173 - protein, 9 aa, Artificial Sequence
  CDR-L3 of I2C
VLWYSNRWV

SEQ ID NO: 174 - protein, 5 aa, Artificial Sequence
  CDR-H1 of I2C
KYAMN

SEQ ID NO: 175 - protein, 19 aa, Artificial Sequence
  CDR-H2 of I2C
RIRSKYNNYATYYADSVKD

SEQ ID NO: 176 - protein, 14 aa, Artificial Sequence
  CDR-H3 of I2C
HGNFGNSYISYWAY

SEQ ID NO: 177 - protein, 125 aa, Artificial Sequence; identical to SEQ ID NO: 33
  VH of I2C

SEQ ID NO: 178 - DNA, 375 bp, Artificial Sequence; identical to SEQ ID NO: 34
  VH of I2C

SEQ ID NO: 179 - protein, 109 aa, Artificial Sequence; identical to SEQ ID NO: 161
  VL of I2C

SEQ ID NO: 180 - DNA, 327 bp, Artificial Sequence; identical to SEQ ID NO: 162
  VL of I2C

SEQ ID NO: 181 - protein, 125 aa, Artificial Sequence; identical to SEQ ID NO: 37
  VH-P of I2C

SEQ ID NO: 182 - DNA, 375 bp, Artificial Sequence; identical to SEQ ID NO: 38
  VH-P of I2C

SEQ ID NO: 183 - protein, 109 aa, Artificial Sequence; identical to SEQ ID NO: 165
  VL-P of I2C

SEQ ID NO: 184 - DNA, 327 bp, Artificial Sequence; identical to SEQ ID NO: 166
  VL-P of I2C

SEQ ID NO: 185 - protein, 249 aa, Artificial Sequence
  VH-VL of I2C
EVQLVESGGGLVQPGGSLKLSCAASGFTFNKYAMNWVRQAPGKGLEWVARIRSKYNNYATYYADSVKDRFTISRDDSKNTAYLQMNNLKTEDTAVYYCVRHGNFGNSYISYWAYWGQGTLVTVSSGGGGSGGGGSGGGGSQTVVTQEPSLTVSPGGTVTLTCGSSTGAVTSGNYPNWVQQKPGQAPRGLIGGTKFLAPGTPARFSGSLLGGKAALTLSGVQPEDEAEYYCVLWYSNRWVFGGGTKLTVL

SEQ ID NO: 186 - DNA, 747 bp, Artificial Sequence
  VH-VL of I2C
gaggtgcagctggtcgagtctggaggaggattggtgcagcctggagggtcattgaaactctcatgtgcagcctctggattcaccttcaataagtacgccatgaactgggtccgccaggctccaggaaagggtttggaatgggttgctcgcataagaagtaaatataataattatgcaacatattatgccgattcagtgaaagacaggttcaccatctccagagatgattcaaaaaacactgcctatctacaaatgaacaacttgaaaactgaggacactgccgtgtactactgtgtgagacatgggaacttcggtaatagctacatatcctactgggcttactggggccaagggactctggtcaccgtctcctcaggtggtggtggttctggcggcggcggctccggtggtggtggttctcagactgttgtgactcaggaaccttcactcaccgtatcacctggtggaacagtcacactcacttgtggctcctcgactggggctgttacatctggcaactacccaaactgggtccaacaaaaaccaggtcaggcaccccgtggtctaataggtgggactaagttcctcgcccccggtactcctgccagattctcaggctccctgcttggaggcaaggctgccctcaccctctcaggggtacagccagaggatgaggcagaatattactgtgttctatggtacagcaaccgctgggtgttcggtggaggaaccaaactgactgtccta

SEQ ID NO: 187 - protein, 249 aa, Artificial Sequence
  VH-VL-P of I2C
EVQLLESGGGLVQPGGSLKLSCAASGFTFNKYAMNWVRQAPGKGLEWVARIRSKYNNYATYYADSVKDRFTISRDDSKNTAYLQMNNLKTEDTAVYYCVRHGNFGNSYISYWAYWGQGTLVTVSSGGGGSGGGGSGGGGSELVVTQEPSLTVSPGGTVTLTCGSSTGAVTSGNYPNWVQQKPGQAPRGLIGGTKFLAPGTPARFSGSLLGGKAALTLSGVQPEDEAEYYCVLWYSNRWVFGGGTKLTVL

SEQ ID NO: 188 - DNA, 747 bp, Artificial Sequence
  VH-VL-P of I2C
gaggtgcagctgctcgagtctggaggaggattggtgcagcctggagggtcattgaaactctcatgtgcagcctctggattcaccttcaataagtacgccatgaactgggtccgccaggctccaggaaagggtttggaatgggttgctcgcataagaagtaaatataataattatgcaacatattatgccgattcagtgaaagacaggttcaccatctccagagatgattcaaaaaacactgcctatctacaaatgaacaacttgaaaactgaggacactgccgtgtactactgtgtgagacatgggaacttcggtaatagctacatatcctactgggcttactggggccaagggactctggtcaccgtctcctcaggtggtggtggttctggcggcggcggctccggtggtggtggttctgagctcgttgtgactcaggaaccttcactcaccgtatcacctggtggaacagtcacactcacttgtggctcctcgactggggctgttacatctggcaactacccaaactgggtccaacaaaaaccaggtcaggcaccccgtggtctaataggtgggactaagttcctcgcccccggtactcctgccagattctcaggctccctgcttggaggcaaggctgccctcaccctctcaggggtacagccagaggatgaggcagaatattactgtgttctatggtacagcaaccgctgggtgttcggtggaggaaccaaactgactgtccta

SEQ ID NO: 189 - protein, 500 aa, Artificial Sequence
  MCSP-G4 VH-VL x H2C VH-VL
QVQLVQSGAEVKRPGASMKVSCKASGYTFTNYYIHWVRQAPGQGLEWMGWINPNSGATNYAQKFQGRVTMTRDTSTSTVYMELSSLRSEDTAVYYCAKSWVSWFASWGQGTLVTVSSGGGGSGGGGSGGGGSDIVMTQSPDSLAVSLGERATINCKSSQSVLNSSNNRNYLAWYQQKPGQPPKLLIYWASTRESGVPDRFSGSGSGTDFTLTISGLQAEDVAVYYCQQHYSTPFTFGPGTKVDIKSGGGGSEVQLVESGGGLVQPGGSLKLSCAASGFTFNKYAMNWVRQAPGKGLEWVARIRSKYNNYATYYADSVKDRFTISRDDSKNTAYLQMNNLKTEDTAVYYCVRHGNFGNSYISYWAYWGQGTLVTVSSGGGGSGGGGSGGGGSQTVVTQEPSLTVSPGGTVTLTCGSSTGAVTSGYYPNWVQQKPGQAPRGLIGGTKFLAPGTPARFSGSLLGGKAALTLSGVQPEDEAEYYCALWYSNRWVFGGGTKLTVL

SEQ ID NO: 190 - DNA, 1500 bp, Artificial Sequence
  MCSP-G4 VH-VL x H2C VH-VL
caggtgcagctggtccagtctggggctgaggtgaagaggcctggggcctcaatgaaggtctcctgcaaggcttctgggtacaccttcaccaactactatatacactgggtgcgacaggcccctggacaaggtcttgagtggatgggttggatcaaccctaacagtggtgccacaaactatgcacagaagttccagggcagagtcaccatgaccagggacacgtccacgagcacagtctacatggagctgagcagcctgagatctgaggacacggccgtgtattactgtgcgaaatcctgggtctcctggtttgcttcctggggtcaaggaaccttggtcaccgtctcctcaggtggtggtggttctggcggcggcggctccggtggtggtggttctgatatcgtgatgacccagtctccagactccctggctgtgtctctgggcgagagggccaccatcaactgcaagtccagccagagtgttttaaacagctccaacaataggaactacttagcttggtaccagcagaaaccaggacagcctcctaagctgctcatttactgggcatctacccgggaatccggggtccctgaccgattcagtggcagcgggtctgggacagatttcactctcaccatcagtggcctgcaggctgaagatgtggcagtttattactgtcagcaacattatagtactccattcacttttggccctgggaccaaagtggatatcaaatccggaggtggtggatccgaggtgcagctggtcgagtctggaggaggattggtgcagcctggagggtcattgaaactctcatgtgcagcctctggattcaccttcaataagtacgccatgaactgggtccgccaggctccaggaaagggtttggaatgggttgctcgcataagaagtaaatataataattatgcaacatattatgccgattcagtgaaagacaggttcaccatctccagagatgattcaaaaaacactgcctatctacaaatgaacaacttgaaaactgaggacactgccgtgtactactgtgtgagacatgggaacttcggtaatagctacatatcctactgggcttactggggccaagggactctggtcaccgtctcctcaggtggtggtggttctggcggcggcggctccggtggtggtggttctcagactgttgtgactcaggaaccttcactcaccgtatcacctggtggaacagtcacactcacttgtggctcctcgactggggctgttacatctggctactacccaaactgggtccaacaaaaaccaggtcaggcaccccgtggtctaataggtgggactaagttcctcgcccccggtactcctgccagattctcaggctccctgcttggaggcaaggctgccctcaccctctcaggggtacagccagaggatgaggcagaatattactgtgctctatggtacagcaaccgctgggtgttcggtggaggaaccaaactgactgtccta

SEQ ID NO: 191 - protein, 500 aa, Artificial Sequence
  MCSP-G4 VH-VL x F12Q VH-VL
QVQLVQSGAEVKRPGASMKVSCKASGYTFTNYYIHWVRQAPGQGLEWMGWINPNSGATNYAQKFQGRVTMTRDTSTSTVYMELSSLRSEDTAVYYCAKSWVSWFASWGQGTLVTVSSGGGGSGGGGSGGGGSDIVMTQSPDSLAVSLGERATINCKSSQSVLNSSNNRNYLAWYQQKPGQPPKLLIYWASTRESGVPDRFSGSGSGTDFTLTISGLQAEDVAVYYCQQHYSTPFTFGPGTKVDIKSGGGGSEVQLVESGGGLVQPGGSLKLSCAASGFTFNSYAMNWVRQAPGKGLEWVARIRSKYNNYATYYADSVKGRFTISRDDSKNTAYLQMNNLKTEDTAVYYCVRHGNFGNSYVSWWAYWGQGTLVTVSSGGGGSGGGGSGGGGSQTVVTQEPSLTVSPGGTVTLTCGSSTGAVTSGNYPNWVQQKPGQAPRGLIGGTKFLAPGTPARFSGSLLGGKAALTLSGVQPEDEAEYYCVLWYSNRWVFGGGTKLTVL

SEQ ID NO: 192 - DNA, 1500 bp, Artificial Sequence
  MCSP-G4 VH-VL x F12Q VH-VL
caggtgcagctggtccagtctggggctgaggtgaagaggcctggggcctcaatgaaggtctcctgcaaggcttctgggtacaccttcaccaactactatatacactgggtgcgacaggcccctggacaaggtcttgagtggatgggttggatcaaccctaacagtggtgccacaaactatgcacagaagttccagggcagagtcaccatgaccagggacacgtccacgagcacagtctacatggagctgagcagcctgagatctgaggacacggccgtgtattactgtgcgaaatcctgggtctcctggtttgcttcctggggtcaaggaaccttggtcaccgtctcctcaggtggtggtggttctggcggcggcggctccggtggtggtggttctgatatcgtgatgacccagtctccagactccctggctgtgtctctgggcgagagggccaccatcaactgcaagtccagccagagtgttttaaacagctccaacaataggaactacttagcttggtaccagcagaaaccaggacagcctcctaagctgctcatttactgggcatctacccgggaatccggggtccctgaccgattcagtggcagcgggtctgggacagatttcactctcaccatcagtggcctgcaggctgaagatgtggcagtttattactgtcagcaacattatagtactccattcacttttggccctgggaccaaagtggatatcaaatccggaggtggtggatccgaggtgcagctggtcgagtctggaggaggattggtgcagcctggagggtcattgaaactctcatgtgcagcctctggattcaccttcaatagctacgccatgaactgggtccgccaggctccaggaaagggtttggaatgggttgctcgcataagaagtaaatataataattatgcaacatattatgccgattcagtgaaaggcaggttcaccatctccagagatgattcaaaaaacactgcctatctacaaatgaacaacttgaaaactgaggacactgccgtgtactactgtgtgagacatgggaacttcggtaatagctacgtttcctggtgggcttactggggccaagggactctggtcaccgtctcctcaggtggtggtggttctggcggcggcggctccggtggtggtggttctcagactgttgtgactcaggaaccttcactcaccgtatcacctggtggaacagtcacactcacttgtggctcctcgactggggctgttacatctggcaactacccaaactgggtccaacaaaaaccaggtcaggcaccccgtggtctaataggtgggactaagttcctcgcccccggtactcctgccagattctcaggctccctgcttggaggcaaggctgccctcaccctctcaggggtacagccagaggatgaggcagaatattactgtgttctatggtacagcaaccgctgggtgttcggtggaggaaccaaactgactgtccta

SEQ ID NO: 193 - protein, 500 aa, Artificial Sequence
  MCSP-G4 VH-VL-P x F6A VH-VL-P
QVQLVQSGAEVKRPGASMKVSCKASGYTFTNYYIHWVRQAPGQGLEWMGWINPNSGATNYAQKFQGRVTMTRDTSTSTVYMELSSLRSEDTAVYYCAKSWVSWFASWGQGTLVTVSSGGGGSGGGGSGGGGSDIVMTQSPDSLAVSLGERATINCKSSQSVLNSSNNRNYLAWYQQKPGQPPKLLIYWASTRESGVPDRFSGSGSGTDFTLTISGLQAEDVAVYYCQQHYSTPFTFGPGTKVDIKSGGGGSEVQLVESGGGLVQPGGSLKLSCAASGFTFNKYAMNWVRQAPGKGLEWVARIRSKYNNYATYYADSVKDRFTISRDDSKNTAYLQMNNLKTEDTAVYYCVRHGNFGNSYISYWAYWGQGTLVTVSSGGGGSGGGGSGGGGSQTVVTQEPSLTVSPGGTVTLTCGSSTGAVTSGNYPNWVQQKPGQAPRGLIGGTKFLAPGTPARFSGSLLGGKAALTLSGVQPEDEAEYYCVLWYSNRWVFGGGTKLTVL

SEQ ID NO: 194 - DNA, 1500 bp, Artificial Sequence
  MCSP-G4 VH-VL-P x F6A VH-VL-P
caggtgcagctggtccagtctggggctgaggtgaagaggcctggggcctcaatgaaggtctcctgcaaggcttctgggtacaccttcaccaactactatatacactgggtgcgacaggcccctggacaaggtcttgagtggatgggttggatcaaccctaacagtggtgccacaaactatgcacagaagttccagggcagagtcaccatgaccagggacacgtccacgagcacagtctacatggagctgagcagcctgagatctgaggacacggccgtgtattactgtgcgaaatcctgggtctcctggtttgcttcctggggtcaaggaaccttggtcaccgtctcctcaggtggtggtggttctggcggcggcggctccggtggtggtggttctgatatcgtgatgacccagtctccagactccctggctgtgtctctgggcgagagggccaccatcaactgcaagtccagccagagtgttttaaacagctccaacaataggaactacttagcttggtaccagcagaaaccaggacagcctcctaagctgctcatttactgggcatctacccgggaatccggggtccctgaccgattcagtggcagcgggtctgggacagatttcactctcaccatcagtggcctgcaggctgaagatgtggcagtttattactgtcagcaacattatagtactccattcacttttggccctgggaccaaagtggatatcaaatccggaggtggtggatccgaggtgcagctggtcgagtctggaggaggattggtgcagcctggagggtcattgaaactctcatgtgcagcctctggattcaccttcaataagtacgccatgaactgggtccgccaggctccaggaaagggtttggaatgggttgctcgcataagaagtaaatataataattatgcaacatattatgccgattcagtgaaagacaggttcaccatctccagagatgattcaaaaaacactgcctatctacaaatgaacaacttgaaaactgaggacactgccgtgtactactgtgtgagacatgggaacttcggtaatagctacatatcctactgggcttactggggccaagggactctggtcaccgtctcctcaggtggtggtggttctggcggcggcggctccggtggtggtggttctcagactgttgtgactcaggaaccttcactcaccgtatcacctggtggaacagtcacactcacttgtggctcctcgactggggctgttacatctggcaactacccaaactgggtccaacaaaaaccaggtcaggcaccccgtggtctaataggtgggactaagttcctcgcccccggtactcctgccagattctcaggctccctgcttggaggcaaggctgccctcaccctctcaggggtacagccagaggatgaggcagaatattactgtgttctatggtacagcaaccgctgggtgttcggtggaggaaccaaactgactgtccta

SEQ ID NO: 195 - protein, 500 aa, Artificial Sequence
  MCSP-G4 VH-VL-P x F6A VH-VL-P
QVQLVQSGAEVKRPGASMKVSCKASGYTFTNYYIHWVRQAPGQGLEWMGWINPNSGATNYAQKFQGRVTMTRDTSTSTVYMELSSLRSEDTAVYYCAKSWVSWFASWGQGTLVTVSSGGGGSGGGGSGGGGSELVMTQSPDSLAVSLGERATINCKSSQSVLNSSNNRNYLAWYQQKPGQPPKLLIYWASTRESGVPDRFSGSGSGTDFTLTISGLQAEDVAVYYCQQHYSTPFTFGPGTKVDIKSGGGGSEVQLLESGGGLVQPGGSLKLSCAASGFTFNIYAMNWVRQAPGKGLEWVARIRSKYNNYATYYADSVKSRFTISRDDSKNTAYLQMNNLKTEDTAVYYCVRHGNFGNSYVSFFAYWGQGTLVTVSSGGGGSGGGGSGGGGSELVVTQEPSLTVSPGGTVTLTCGSSTGAVTSGYYPNWVQQKPGQAPRGLIGGTKFLAPGTPARFSGSLLGGKAALTLSGVQPEDEAEYYCALWYSNRWVFGGGTKLTVL

SEQ ID NO: 196 - DNA, 1500 bp, Artificial Sequence
  MCSP-G4 VH-VL-P x F6A VH-VL-P
caggtgcagctggtccagtctggggctgaggtgaagaggcctggggcctcaatgaaggtctcctgcaaggcttctgggtacaccttcaccaactactatatacactgggtgcgacaggcccctggacaaggtcttgagtggatgggttggatcaaccctaacagtggtgccacaaactatgcacagaagttccagggcagagtcaccatgaccagggacacgtccacgagcacagtctacatggagctgagcagcctgagatctgaggacacggccgtgtattactgtgcgaaatcctgggtctcctggtttgcttcctggggtcaaggaaccttggtcaccgtctcctcaggtggtggtggttctggcggcggcggctccggtggtggtggttctgagctcgtgatgacccagtctccagactccctggctgtgtctctgggcgagagggccaccatcaactgcaagtccagccagagtgttttaaacagctccaacaataggaactacttagcttggtaccagcagaaaccaggacagcctcctaagctgctcatttactgggcatctacccgggaatccggggtccctgaccgattcagtggcagcgggtctgggacagatttcactctcaccatcagtggcctgcaggctgaagatgtggcagtttattactgtcagcaacattatagtactccattcacttttggccctgggaccaaagtggatatcaaatccggaggtggtggatccgaggtgcagctgctcgagtctggaggaggattggtgcagcctggagggtcattgaaactctcatgtgcagcctctggattcaccttcaatatctacgccatgaactgggtccgccaggctccaggaaagggtttggaatgggttgctcgcataagaagtaaatataataattatgcaacatattatgccgattcagtgaaaagcaggttcaccatctccagagatgattcaaaaaacactgcctatctacaaatgaacaacttgaaaactgaggacactgccgtgtactactgtgtgagacatgggaacttcggtaatagctacgtatccttcttcgcttactggggccaagggactctggtcaccgtctcctcaggtggtggtggttctggcggcggcggctccggtggtggtggttctgagctcgttgtgactcaggaaccttcactcaccgtatcacctggtggaacagtcacactcacttgtggctcctcgactggggctgttacatctggctactacccaaactgggtccaacaaaaaccaggtcaggcaccccgtggtctaataggtgggactaagttcctcgcccccggtactcctgccagattctcaggctccctgcttggaggcaaggctgccctcaccctctcaggggtacagccagaggatgaggcagaatattactgtgctctatggtacagcaaccgctgggtgttcggtggaggaaccaaactgactgtccta

SEQ ID NO: 197 - protein, 500 aa, Artificial Sequence
  MCSP-G4 VH-VL-P x H2C VH-VL-P
QVQLVQSGAEVKRPGASMKVSCKASGYTFTNYYIHWVRQAPGQGLEWMGWINPNSGATNYAQKFQGRVTMTRDTSTSTVYMELSSLRSEDTAVYYCAKSWVSWFASWGQGTLVTVSSGGGGSGGGGSGGGGSELVMTQSPDSLAVSLGERATINCKSSQSVLNSSNNRNYLAWYQQKPGQPPKLLIYWASTRESGVPDRFSGSGSGTDFTLTISGLQAEDVAVYYCQQHYSTPFTFGPGTKVDIKSGGGGSEVQLLESGGGLVQPGGSLKLSCAASGFTFNKYAMNWVRQAPGKGLEWVARIRSKYNNYATYYADSVKDRFTISRDDSKNTAYLQMNNLKTEDTAVYYCVRHGNFGNSYISYWAYWGQGTLVTVSSGGGGSGGGGSGGGGSELVVTQEPSLTVSPGGTVTLTCGSSTGAVTSGYYPNWVQQKPGQAPRGLIGGTKFLAPGTPARFSGSLLGGKAALTLSGVQPEDEAEYYCALWYSNRWVFGGGTKLTVL

SEQ ID NO: 198 - DNA, 1500 bp, Artificial Sequence
  MCSP-G4 VH-VL-P x H2C VH-VL-P
caggtgcagctggtccagtctggggctgaggtgaagaggcctggggcctcaatgaaggtctcctgcaaggcttctgggtacaccttcaccaactactatatacactgggtgcgacaggcccctggacaaggtcttgagtggatgggttggatcaaccctaacagtggtgccacaaactatgcacagaagttccagggcagagtcaccatgaccagggacacgtccacgagcacagtctacatggagctgagcagcctgagatctgaggacacggccgtgtattactgtgcgaaatcctgggtctcctggtttgcttcctggggtcaaggaaccttggtcaccgtctcctcaggtggtggtggttctggcggcggcggctccggtggtggtggttctgagctcgtgatgacccagtctccagactccctggctgtgtctctgggcgagagggccaccatcaactgcaagtccagccagagtgttttaaacagctccaacaataggaactacttagcttggtaccagcagaaaccaggacagcctcctaagctgctcatttactgggcatctacccgggaatccggggtccctgaccgattcagtggcagcgggtctgggacagatttcactctcaccatcagtggcctgcaggctgaagatgtggcagtttattactgtcagcaacattatagtactccattcacttttggccctgggaccaaagtggatatcaaatccggaggtggtggatccgaggtgcagctgctcgagtctggaggaggattggtgcagcctggagggtcattgaaactctcatgtgcagcctctggattcaccttcaataagtacgccatgaactgggtccgccaggctccaggaaagggtttggaatgggttgctcgcataagaagtaaatataataattatgcaacatattatgccgattcagtgaaagacaggttcaccatctccagagatgattcaaaaaacactgcctatctacaaatgaacaacttgaaaactgaggacactgccgtgtactactgtgtgagacatgggaacttcggtaatagctacatatcctactgggcttactggggccaagggactctggtcaccgtctcctcaggtggtggtggttctggcggcggcggctccggtggtggtggttctgagctcgttgtgactcaggaaccttcactcaccgtatcacctggtggaacagtcacactcacttgtggctcctcgactggggctgttacatctggctactacccaaactgggtccaacaaaaaccaggtcaggcaccccgtggtctaataggtgggactaagttcctcgcccccggtactcctgccagattctcaggctccctgcttggaggcaaggctgccctcaccctctcaggggtacagccagaggatgaggcagaatattactgtgctctatggtacagcaaccgctgggtgttcggtggaggaaccaaactgactgtccta

SEQ ID NO: 199 - protein, 500 aa, Artificial Sequence
  MCSP-G4 VH-VL-P x H1E VH-VL-P
QVQLVQSGAEVKRPGASMKVSCKASGYTFTNYYIHWVRQAPGQGLEWMGWINPNSGATNYAQKFQGRVTMTRDTSTSTVYMELSSLRSEDTAVYYCAKSWVSWFASWGQGTLVTVSSGGGGSGGGGSGGGGSELVMTQSPDSLAVSLGERATINCKSSQSVLNSSNNRNYLAWYQQKPGQPPKLLIYWASTRESGVPDRFSGSGSGTDFTLTISGLQAEDVAVYYCQQHYSTPFTFGPGTKVDIKSGGGGSEVQLLESGGGLEQPGGSLKLSCAASGFTFNSYAMNWVRQAPGKGLEWVARIRSKYNNYATYYADSVKGRFTISRDDSKNTAYLQMNNLKTEDTAVYYCVRHGNFGNSYLSFWAYWGQGTLVTVSSGGGGSGGGGSGGGGSELVVTQEPSLTVSPGGTVTLTCGSSTGAVTSGYYPNWVQQKPGQAPRGLIGGTKFLAPGTPARFSGSLLGGKAALTLSGVQPEDEAEYYCALWYSNRWVFGGGTKLTVL

SEQ ID NO: 200 - DNA, 1500 bp, Artificial Sequence
  MCSP-G4 VH-VL-P x H1E VH-VL-P
caggtgcagctggtccagtctggggctgaggtgaagaggcctggggcctcaatgaaggtctcctgcaaggcttctgggtacaccttcaccaactactatatacactgggtgcgacaggcccctggacaaggtcttgagtggatgggttggatcaaccctaacagtggtgccacaaactatgcacagaagttccagggcagagtcaccatgaccagggacacgtccacgagcacagtctacatggagctgagcagcctgagatctgaggacacggccgtgtattactgtgcgaaatcctgggtctcctggtttgcttcctggggtcaaggaaccttggtcaccgtctcctcaggtggtggtggttctggcggcggcggctccggtggtggtggttctgagctcgtgatgacccagtctccagactccctggctgtgtctctgggcgagagggccaccatcaactgcaagtccagccagagtgttttaaacagctccaacaataggaactacttagcttggtaccagcagaaaccaggacagcctcctaagctgctcatttactgggcatctacccgggaatccggggtccctgaccgattcagtggcagcgggtctgggacagatttcactctcaccatcagtggcctgcaggctgaagatgtggcagtttattactgtcagcaacattatagtactccattcacttttggccctgggaccaaagtggatatcaaatccggaggtggtggatccgaggtgcagctgctcgagtctggaggaggattggagcagcctggagggtcattgaaactctcatgtgcagcctctggattcaccttcaattcgtacgccatgaactgggtccgccaggctccaggaaagggtttggaatgggttgctcgcataagaagtaaatataataattatgcaacatattatgccgattcagtgaaagggaggttcaccatctccagagatgattcaaaaaacactgcctatctacaaatgaacaacttgaaaactgaggacactgccgtgtactactgtgtgagacatgggaacttcggtaatagctacctatccttctgggcttactggggccaagggactctggtcaccgtctcctcaggtggtggtggttctggcggcggcggctccggtggtggtggttctgagctcgttgtgactcaggaaccttcactcaccgtatcacctggtggaacagtcacactcacttgtggctcctcgactggggctgttacatctggctactacccaaactgggtccaacaaaaaccaggtcaggcaccccgtggtctaataggtgggactaagttcctcgcccccggtactcctgccagattctcaggctccctgcttggaggcaaggctgccctcaccctctcaggggtacagccagaggatgaggcagaatattactgtgctctatggtacagcaaccgctgggtgttcggtggaggaaccaaactgactgtccta

SEQ ID NO: 201 - protein, 500 aa, Artificial Sequence
  MCSP-G4 VH-VL-P x G4H VH-VL-P
QVQLVQSGAEVKRPGASMKVSCKASGYTFTNYYIHWVRQAPGQGLEWMGWINPNSGATNYAQKFQGRVTMTRDTSTSTVYMELSSLRSEDTAVYYCAKSWVSWFASWGQGTLVTVSSGGGGSGGGGSGGGGSELVMTQSPDSLAVSLGERATINCKSSQSVLNSSNNRNYLAWYQQKPGQPPKLLIYWASTRESGVPDRFSGSGSGTDFTLTISGLQAEDVAVYYCQQHYSTPFTFGPGTKVDIKSGGGGSEVQLLESGGGLVQPGGSLKLSCAASGFTFNRYAMNWVRQAPGKGLEWVARIRSKYNNYATYYADSVKGRFTISRDDSKNTAYLQMNNLKTEDTAVYYCVRHGNFGNSYLSYFAYWGQGTLVTVSSGGGGSGGGGSGGGGSELVVTQEPSLTVSPGGTVTLTCGSSTGAVTSGYYPNWVQQKPGQAPRGLIGGTKFLAPGTPARFSGSLLGGKAALTLSGVQPEDEAEYYCALWYSNRWVFGGGTKLTVL

SEQ ID NO: 202 - DNA, 1500 bp, Artificial Sequence
  MCSP-G4 VH-VL-P x G4H VH-VL-P
caggtgcagctggtccagtctggggctgaggtgaagaggcctggggcctcaatgaaggtctcctgcaaggcttctgggtacaccttcaccaactactatatacactgggtgcgacaggcccctggacaaggtcttgagtggatgggttggatcaaccctaacagtggtgccacaaactatgcacagaagttccagggcagagtcaccatgaccagggacacgtccacgagcacagtctacatggagctgagcagcctgagatctgaggacacggccgtgtattactgtgcgaaatcctgggtctcctggtttgcttcctggggtcaaggaaccttggtcaccgtctcctcaggtggtggtggttctggcggcggcggctccggtggtggtggttctgagctcgtgatgacccagtctccagactccctggctgtgtctctgggcgagagggccaccatcaactgcaagtccagccagagtgttttaaacagctccaacaataggaactacttagcttggtaccagcagaaaccaggacagcctcctaagctgctcatttactgggcatctacccgggaatccggggtccctgaccgattcagtggcagcgggtctgggacagatttcactctcaccatcagtggcctgcaggctgaagatgtggcagtttattactgtcagcaacattatagtactccattcacttttggccctgggaccaaagtggatatcaaatccggaggtggtggatccgaggtgcagctgctcgagtctggaggaggattggtgcagcctggagggtcattgaaactctcatgtgcagcctctggattcaccttcaatcgctacgccatgaactgggtccgccaggctccaggaaagggtttggaatgggttgctcgcataagaagtaaatataataattatgcaacatattatgccgattcagtgaaagggaggttcaccatctccagagatgattcaaaaaacactgcctatctacaaatgaacaacttgaaaactgaggacactgccgtgtactactgtgtgagacatgggaacttcggtaatagctacttatcctacttcgcttactggggccaagggactctggtcaccgtctcctcaggtggtggtggttctggcggcggcggctccggtggtggtggttctgagctcgttgtgactcaggaaccttcactcaccgtatcacctggtggaacagtcacactcacttgtggctcctcgactggggctgttacatctggctactacccaaactgggtccaacaaaaaccaggtcaggcaccccgtggtctaataggtgggactaagttcctcgcccccggtactcctgccagattctcaggctccctgcttggaggcaaggctgccctcaccctctcaggggtacagccagaggatgaggcagaatattactgtgctctatggtacagcaaccgctgggtgttcggtggaggaaccaaactgactgtccta

SEQ ID NO: 203 - protein, 500 aa, Artificial Sequence
  MCSP-G4 VH-VL-P x A2J VH-VL-P
QVQLVQSGAEVKRPGASMKVSCKASGYTFTNYYIHWVRQAPGQGLEWMGWINPNSGATNYAQKFQGRVTMTRDTSTSTVYMELSSLRSEDTAVYYCAKSWVSWFASWGQGTLVTVSSGGGGSGGGGSGGGGSELVMTQSPDSLAVSLGERATINCKSSQSVLNSSNNRNYLAWYQQKPGQPPKLLIYWASTRESGVPDRFSGSGSGTDFTLTISGLQAEDVAVYYCQQHYSTPFTFGPGTKVDIKSGGGGSEVQLLESGGGLVQPGGSLKLSCAASGFTFNVYAMNWVRQAPGKGLEWVARIRSKYNNYATYYADSVKKRFTISRDDSKNTAYLQMNNLKTEDTAVYYCVRHGNFGNSYLSWWAYWGQGTLVTVSSGGGGSGGGGSGGGGSELVVTQEPSLTVSPGGTVTLTCRSSTGAVTSGYYPNWVQQKPGQAPRGLIGATDMRPSGTPARFSGSLLGGKAALTLSGVQPEDEAEYYCALWYSNRWVFGGGTKLTVL

SEQ ID NO: 204 - DNA, 1500 bp, Artificial Sequence
  MCSP-G4 VH-VL-P x A2J VH-VL-P
caggtgcagctggtccagtctggggctgaggtgaagaggcctggggcctcaatgaaggtctcctgcaaggcttctgggtacaccttcaccaactactatatacactgggtgcgacaggcccctggacaaggtcttgagtggatgggttggatcaaccctaacagtggtgccacaaactatgcacagaagttccagggcagagtcaccatgaccagggacacgtccacgagcacagtctacatggagctgagcagcctgagatctgaggacacggccgtgtattactgtgcgaaatcctgggtctcctggtttgcttcctggggtcaaggaaccttggtcaccgtctcctcaggtggtggtggttctggcggcggcggctccggtggtggtggttctgagctcgtgatgacccagtctccagactccctggctgtgtctctgggcgagagggccaccatcaactgcaagtccagccagagtgttttaaacagctccaacaataggaactacttagcttggtaccagcagaaaccaggacagcctcctaagctgctcatttactgggcatctacccgggaatccggggtccctgaccgattcagtggcagcgggtctgggacagatttcactctcaccatcagtggcctgcaggctgaagatgtggcagtttattactgtcagcaacattatagtactccattcacttttggccctgggaccaaagtggatatcaaatccggaggtggtggatccgaggtgcagctgctcgagtctggaggaggattggtgcagcctggagggtcattgaaactctcatgtgcagcctctggattcaccttcaatgtctacgccatgaactgggtccgccaggctccaggaaagggtttggaatgggttgctcgcataagaagtaaatataataattatgcaacatattatgccgattcagtgaaaaagaggttcaccatctccagagatgattcaaaaaacactgcctatctacaaatgaacaacttgaaaactgaggacactgccgtgtactactgtgtgagacatgggaacttcggtaatagctacttatcctggtgggcttactggggccaagggactctggtcaccgtctcctcaggtggtggtggttctggcggcggcggctccggtggtggtggttctgagctcgttgtgactcaggaaccttcactcaccgtatcacctggtggaacagtcacactcacttgtcgctcctcgactggggctgttacatctggctactacccaaactgggtccaacaaaaaccaggtcaggcaccccgtggtctaataggtgccactgacatgaggccctctggtactcctgccagattctcaggctccctgcttggaggcaaggctgccctcaccctctcaggggtacagccagaggatgaggcagaatattactgtgctctatggtacagcaaccgctgggtgttcggtggaggaaccaaactgactgtccta

SEQ ID NO: 205 - protein, 500 aa, Artificial Sequence
  MCSP-G4 VH-VL-P x E1L VH-VL-P
QVQLVQSGAEVKRPGASMKVSCKASGYTFTNYYIHWVRQAPGQGLEWMGWINPNSGATNYAQKFQGRVTMTRDTSTSTVYMELSSLRSEDTAVYYCAKSWVSWFASWGQGTLVTVSSGGGGSGGGGSGGGGSELVMTQSPDSLAVSLGERATINCKSSQSVLNSSNNRNYLAWYQQKPGQPPKLLIYWASTRESGVPDRFSGSGSGTDFTLTISGLQAEDVAVYYCQQHYSTPFTFGPGTKVDIKSGGGGSEVQLLESGGGLVQPGGSLKLSCAASGFTFNKYAMNWVRQAPGKGLEWVARIRSKYNNYATYYADSVKSRFTISRDDSKNTAYLQMNNLKTEDTAVYYCVRHGNFGNSYTSYYAYWGQGTLVTVSSGGGGSGGGGSGGGGSELVVTQEPSLTVSPGGTVTLTCGSSTGAVTSGYYPNWVQQKPGQAPRGLIGGTKFLAPGTPARFSGSLLGGKAALTLSGVQPEDEAEYYCALWYSNRWVFGGGTKLTVL

SEQ ID NO: 206 - DNA, 1500 bp, Artificial Sequence
  MCSP-G4 VH-VL-P x E1L VH-VL-P
caggtgcagctggtccagtctggggctgaggtgaagaggcctggggcctcaatgaaggtctcctgcaaggcttctgggtacaccttcaccaactactatatacactgggtgcgacaggcccctggacaaggtcttgagtggatgggttggatcaaccctaacagtggtgccacaaactatgcacagaagttccagggcagagtcaccatgaccagggacacgtccacgagcacagtctacatggagctgagcagcctgagatctgaggacacggccgtgtattactgtgcgaaatcctgggtctcctggtttgcttcctggggtcaaggaaccttggtcaccgtctcctcaggtggtggtggttctggcggcggcggctccggtggtggtggttctgagctcgtgatgacccagtctccagactccctggctgtgtctctgggcgagagggccaccatcaactgcaagtccagccagagtgttttaaacagctccaacaataggaactacttagcttggtaccagcagaaaccaggacagcctcctaagctgctcatttactgggcatctacccgggaatccggggtccctgaccgattcagtggcagcgggtctgggacagatttcactctcaccatcagtggcctgcaggctgaagatgtggcagtttattactgtcagcaacattatagtactccattcacttttggccctgggaccaaagtggatatcaaatccggaggtggtggatccgaggtgcagctgctcgagtctggaggaggattggtgcagcctggagggtcattgaaactctcatgtgcagcctctggattcaccttcaataagtacgccatgaactgggtccgccaggctccaggaaagggtttggaatgggttgctcgcataagaagtaaatataataattatgcaacatattatgccgattcagtgaaatcgaggttcaccatctccagagatgattcaaaaaacactgcctatctacaaatgaacaacttgaaaactgaggacactgccgtgtactactgtgtgagacatgggaacttcggtaatagctacacatcctactacgcttactggggccaagggactctggtcaccgtctcctcaggtggtggtggttctggcggcggcggctccggtggtggtggttctgagctcgttgtgactcaggaaccttcactcaccgtatcacctggtggaacagtcacactcacttgtggctcctcgactggggctgttacatctggctactacccaaactgggtccaacaaaaaccaggtcaggcaccccgtggtctaataggtgggactaagttcctcgcccccggtactcctgccagattctcaggctccctgcttggaggcaaggctgccctcaccctctcaggggtacagccagaggatgaggcagaatattactgtgctctatggtacagcaaccgctgggtgttcggtggaggaaccaaactgactgtccta

SEQ ID NO: 207 - protein, 500 aa, Artificial Sequence
  MCSP-G4 VH-VL-P x E2M VH-VL-P
QVQLVQSGAEVKRPGASMKVSCKASGYTFTNYYIHWVRQAPGQGLEWMGWINPNSGATNYAQKFQGRVTMTRDTSTSTVYMELSSLRSEDTAVYYCAKSWVSWFASWGQGTLVTVSSGGGGSGGGGSGGGGSELVMTQSPDSLAVSLGERATINCKSSQSVLNSSNNRNYLAWYQQKPGQPPKLLIYWASTRESGVPDRFSGSGSGTDFTLTISGLQAEDVAVYYCQQHYSTPFTFGPGTKVDIKSGGGGSEVQLLESGGGLVQPGGSLKLSCAASGFTFNGYAMNWVRQAPGKGLEWVARIRSKYNNYATYYADSVKERFTISRDDSKNTAYLQMNNLKTEDTAVYYCVRHRNFGNSYLSWFAYWGQGTLVTVSSGGGGSGGGGSGGGGSELVVTQEPSLTVSPGGTVTLTCRSSTGAVTSGYYPNWVQQKPGQAPRGLIGATDMRPSGTPARFSGSLLGGKAALTLSGVQPEDEAEYYCALWYSNRWVFGGGTKLTVL

SEQ ID NO: 208 - DNA, 1500 bp, Artificial Sequence
  MCSP-G4 VH-VL-P x E2M VH-VL-P
caggtgcagctggtccagtctggggctgaggtgaagaggcctggggcctcaatgaaggtctcctgcaaggcttctgggtacaccttcaccaactactatatacactgggtgcgacaggcccctggacaaggtcttgagtggatgggttggatcaaccctaacagtggtgccacaaactatgcacagaagttccagggcagagtcaccatgaccagggacacgtccacgagcacagtctacatggagctgagcagcctgagatctgaggacacggccgtgtattactgtgcgaaatcctgggtctcctggtttgcttcctggggtcaaggaaccttggtcaccgtctcctcaggtggtggtggttctggcggcggcggctccggtggtggtggttctgagctcgtgatgacccagtctccagactccctggctgtgtctctgggcgagagggccaccatcaactgcaagtccagccagagtgttttaaacagctccaacaataggaactacttagcttggtaccagcagaaaccaggacagcctcctaagctgctcatttactgggcatctacccgggaatccggggtccctgaccgattcagtggcagcgggtctgggacagatttcactctcaccatcagtggcctgcaggctgaagatgtggcagtttattactgtcagcaacattatagtactccattcacttttggccctgggaccaaagtggatatcaaatccggaggtggtggatccgaggtgcagctgctcgagtctggaggaggattggtgcagcctggagggtcattgaaactctcatgtgcagcctctggattcaccttcaatggctacgccatgaactgggtccgccaggctccaggaaagggtttggaatgggttgctcgcataagaagtaaatataataattatgcaacatattatgccgattcagtgaaagagaggttcaccatctccagagatgattcaaaaaacactgcctatctacaaatgaacaacttgaaaactgaggacactgccgtgtactactgtgtgagacataggaacttcggtaatagctacttatcctggttcgcttactggggccaagggactctggtcaccgtctcctcaggtggtggtggttctggcggcggcggctccggtggtggtggttctgagctcgttgtgactcaggaaccttcactcaccgtatcacctggtggaacagtcacactcacttgtcgctcctcgactggggctgttacatctggctactacccaaactgggtccaacaaaaaccaggtcaggcaccccgtggtctaataggtgccactgacatgaggccctctggtactcctgccagattctcaggctccctgcttggaggcaaggctgccctcaccctctcaggggtacagccagaggatgaggcagaatattactgtgctctatggtacagcaaccgctgggtgttcggtggaggaaccaaactgactgtccta

SEQ ID NO: 209 - protein, 500 aa, Artificial Sequence
  MCSP-G4 VH-VL-P x F7O VH-VL-P
QVQLVQSGAEVKRPGASMKVSCKASGYTFTNYYIHWVRQAPGQGLEWMGWINPNSGATNYAQKFQGRVTMTRDTSTSTVYMELSSLRSEDTAVYYCAKSWVSWFASWGQGTLVTVSSGGGGSGGGGSGGGGSELVMTQSPDSLAVSLGERATINCKSSQSVLNSSNNRNYLAWYQQKPGQPPKLLIYWASTRESGVPDRFSGSGSGTDFTLTISGLQAEDVAVYYCQQHYSTPFTFGPGTKVDIKSGGGGSEVQLLESGGGLVQPGGSLKLSCAASGFTFNVYAMNWVRQAPGKGLEWVARIRSKYNNYATYYADSVKKRFTISRDDSKNTAYLQMNNLKTEDTAVYYCVRHGNFGNSYISWWAYWGQGTLVTVSSGGGGSGGGGSGGGGSELVVTQEPSLTVSPGGTVTLTCGSSTGAVTSGYYPNWVQQKPGQAPRGLIGGTKFLAPGTPARFSGSLLGGKAALTLSGVQPEDEAEYYCALWYSNRWVFGGGTKLTVL

SEQ ID NO: 210 - DNA, 1500 bp, Artificial Sequence
  MCSP-G4 VH-VL-P x F7O VH-VL-P
caggtgcagctggtccagtctggggctgaggtgaagaggcctggggcctcaatgaaggtctcctgcaaggcttctgggtacaccttcaccaactactatatacactgggtgcgacaggcccctggacaaggtcttgagtggatgggttggatcaaccctaacagtggtgccacaaactatgcacagaagttccagggcagagtcaccatgaccagggacacgtccacgagcacagtctacatggagctgagcagcctgagatctgaggacacggccgtgtattactgtgcgaaatcctgggtctcctggtttgcttcctggggtcaaggaaccttggtcaccgtctcctcaggtggtggtggttctggcggcggcggctccggtggtggtggttctgagctcgtgatgacccagtctccagactccctggctgtgtctctgggcgagagggccaccatcaactgcaagtccagccagagtgttttaaacagctccaacaataggaactacttagcttggtaccagcagaaaccaggacagcctcctaagctgctcatttactgggcatctacccgggaatccggggtccctgaccgattcagtggcagcgggtctgggacagatttcactctcaccatcagtggcctgcaggctgaagatgtggcagtttattactgtcagcaacattatagtactccattcacttttggccctgggaccaaagtggatatcaaatccggaggtggtggatccgaggtgcagctgctcgagtctggaggaggattggtgcagcctggagggtcattgaaactctcatgtgcagcctctggattcaccttcaatgtgtacgccatgaactgggtccgccaggctccaggaaagggtttggaatgggttgctcgcataagaagtaaatataataattatgcaacatattatgccgattcagtgaaaaagaggttcaccatctccagagatgattcaaaaaacactgcctatctacaaatgaacaacttgaaaactgaggacactgccgtgtactactgtgtgagacatgggaacttcggtaatagctacatatcctggtgggcttactggggccaagggactctggtcaccgtctcctcaggtggtggtggttctggcggcggcggctccggtggtggtggttctgagctcgttgtgactcaggaaccttcactcaccgtatcacctggtggaacagtcacactcacttgtggctcctcgactggggctgttacatctggctactacccaaactgggtccaacaaaaaccaggtcaggcaccccgtggtctaataggtgggactaagttcctcgcccccggtactcctgccagattctcaggctccctgcttggaggcaaggctgccctcaccctctcaggggtacagccagaggatgaggcagaatattactgtgctctatggtacagcaaccgctgggtgttcggtggaggaaccaaactgactgtccta

SEQ ID NO: 211 - protein, 500 aa, Artificial Sequence
  MCSP-G4 VH-VL-P x F12Q VH-VL
QVQLVQSGAEVKRPGASMKVSCKASGYTFTNYYIHWVRQAPGQGLEWMGWINPNSGATNYAQKFQGRVTMTRDTSTSTVYMELSSLRSEDTAVYYCAKSWVSWFASWGQGTLVTVSSGGGGSGGGGSGGGGSELVMTQSPDSLAVSLGERATINCKSSQSVLNSSNNRNYLAWYQQKPGQPPKLLIYWASTRESGVPDRFSGSGSGTDFTLTISGLQAEDVAVYYCQQHYSTPFTFGPGTKVDIKSGGGGSEVQLVESGGGLVQPGGSLKLSCAASGFTFNSYAMNWVRQAPGKGLEWVARIRSKYNNYATYYADSVKGRFTISRDDSKNTAYLQMNNLKTEDTAVYYCVRHGNFGNSYVSWWAYWGQGTLVTVSSGGGGSGGGGSGGGGSQTVVTQEPSLTVSPGGTVTLTCGSSTGAVTSGNYPNWVQQKPGQAPRGLIGGTKFLAPGTPARFSGSLLGGKAALTLSGVQPEDEAEYYCVLWYSNRWVFGGGTKLTVL

SEQ ID NO: 212 - DNA, 1500 bp, Artificial Sequence
  MCSP-G4 VH-VL-P x F12Q VH-VL
caggtgcagctggtccagtctggggctgaggtgaagaggcctggggcctcaatgaaggtctcctgcaaggcttctgggtacaccttcaccaactactatatacactgggtgcgacaggcccctggacaaggtcttgagtggatgggttggatcaaccctaacagtggtgccacaaactatgcacagaagttccagggcagagtcaccatgaccagggacacgtccacgagcacagtctacatggagctgagcagcctgagatctgaggacacggccgtgtattactgtgcgaaatcctgggtctcctggtttgcttcctggggtcaaggaaccttggtcaccgtctcctcaggtggtggtggttctggcggcggcggctccggtggtggtggttctgagctcgtgatgacccagtctccagactccctggctgtgtctctgggcgagagggccaccatcaactgcaagtccagccagagtgttttaaacagctccaacaataggaactacttagcttggtaccagcagaaaccaggacagcctcctaagctgctcatttactgggcatctacccgggaatccggggtccctgaccgattcagtggcagcgggtctgggacagatttcactctcaccatcagtggcctgcaggctgaagatgtggcagtttattactgtcagcaacattatagtactccattcacttttggccctgggaccaaagtggatatcaaatccggaggtggtggatccgaggtgcagctggtcgagtctggaggaggattggtgcagcctggagggtcattgaaactctcatgtgcagcctctggattcaccttcaatagctacgccatgaactgggtccgccaggctccaggaaagggtttggaatgggttgctcgcataagaagtaaatataataattatgcaacatattatgccgattcagtgaaaggcaggttcaccatctccagagatgattcaaaaaacactgcctatctacaaatgaacaacttgaaaactgaggacactgccgtgtactactgtgtgagacatgggaacttcggtaatagctacgtttcctggtgggcttactggggccaagggactctggtcaccgtctcctcaggtggtggtggttctggcggcggcggctccggtggtggtggttctcagactgttgtgactcaggaaccttcactcaccgtatcacctggtggaacagtcacactcacttgtggctcctcgactggggctgttacatctggcaactacccaaactgggtccaacaaaaaccaggtcaggcaccccgtggtctaataggtgggactaagttcctcgcccccggtactcctgccagattctcaggctccctgcttggaggcaaggctgccctcaccctctcaggggtacagccagaggatgaggcagaatattactgtgttctatggtacagcaaccgctgggtgttcggtggaggaaccaaactgactgtccta

SEQ ID NO: 213 - protein, 500 aa, Artificial Sequence
  MCSP-G4 VH-VL-P x I2C VH-VL
QVQLVQSGAEVKRPGASMKVSCKASGYTFTNYYIHWVRQAPGQGLEWMGWINPNSGATNYAQKFQGRVTMTRDTSTSTVYMELSSLRSEDTAVYYCAKSWVSWFASWGQGTLVTVSSGGGGSGGGGSGGGGSELVMTQSPDSLAVSLGERATINCKSSQSVLNSSNNRNYLAWYQQKPGQPPKLLIYWASTRESGVPDRFSGSGSGTDFTLTISGLQAEDVAVYYCQQHYSTPFTFGPGTKVDIKSGGGGSEVQLVESGGGLVQPGGSLKLSCAASGFTFNKYAMNWVRQAPGKGLEWVARIRSKYNNYATYYADSVKDRFTISRDDSKNTAYLQMNNLKTEDTAVYYCVRHGNFGNSYISYWAYWGQGTLVTVSSGGGGSGGGGSGGGGSQTVVTQEPSLTVSPGGTVTLTCGSSTGAVTSGNYPNWVQQKPGQAPRGLIGGTKFLAPGTPARFSGSLLGGKAALTLSGVQPEDEAEYYCVLWYSNRWVFGGGTKLTVL

SEQ ID NO: 214 - DNA, 1500 bp, Artificial Sequence
  MCSP-G4 VH-VL-P x I2C VH-VL
caggtgcagctggtccagtctggggctgaggtgaagaggcctggggcctcaatgaaggtctcctgcaaggcttctgggtacaccttcaccaactactatatacactgggtgcgacaggcccctggacaaggtcttgagtggatgggttggatcaaccctaacagtggtgccacaaactatgcacagaagttccagggcagagtcaccatgaccagggacacgtccacgagcacagtctacatggagctgagcagcctgagatctgaggacacggccgtgtattactgtgcgaaatcctgggtctcctggtttgcttcctggggtcaaggaaccttggtcaccgtctcctcaggtggtggtggttctggcggcggcggctccggtggtggtggttctgagctcgtgatgacccagtctccagactccctggctgtgtctctgggcgagagggccaccatcaactgcaagtccagccagagtgttttaaacagctccaacaataggaactacttagcttggtaccagcagaaaccaggacagcctcctaagctgctcatttactgggcatctacccgggaatccggggtccctgaccgattcagtggcagcgggtctgggacagatttcactctcaccatcagtggcctgcaggctgaagatgtggcagtttattactgtcagcaacattatagtactccattcacttttggccctgggaccaaagtggatatcaaatccggaggtggtggatccgaggtgcagctggtcgagtctggaggaggattggtgcagcctggagggtcattgaaactctcatgtgcagcctctggattcaccttcaataagtacgccatgaactgggtccgccaggctccaggaaagggtttggaatgggttgctcgcataagaagtaaatataataattatgcaacatattatgccgattcagtgaaagacaggttcaccatctccagagatgattcaaaaaacactgcctatctacaaatgaacaacttgaaaactgaggacactgccgtgtactactgtgtgagacatgggaacttcggtaatagctacatatcctactgggcttactggggccaagggactctggtcaccgtctcctcaggtggtggtggttctggcggcggcggctccggtggtggtggttctcagactgttgtgactcaggaaccttcactcaccgtatcacctggtggaacagtcacactcacttgtggctcctcgactggggctgttacatctggcaactacccaaactgggtccaacaaaaaccaggtcaggcaccccgtggtctaataggtgggactaagttcctcgcccccggtactcctgccagattctcaggctccctgcttggaggcaaggctgccctcaccctctcaggggtacagccagaggatgaggcagaatattactgtgttctatggtacagcaaccgctgggtgttcggtggaggaaccaaactgactgtccta

SEQ ID NO: 215 - protein, 500 aa, Artificial Sequence
  MCSP-D2 VH-VL x H2C VH-VL
QVQLVQSGAEVKKPGASVKVSCKASGYTFTGYYMHWVRQAPGQGLEWMGWINPNSGGTSYAQKFQGRVTMTRDTSTSTVYMELSNLRSDDTAVYYCAKSWVSWFASWGQGTLVTVSSGGGGSGGGGSGGGGSDIVMTQSPDSLAVSLGERATINCKSSQSVLNSSNNRNYLAWYQQKPGQPPKLLIYWASTRESGVPDRFSGSGSGTDFTLTISGLQAEDVAVYYCQQHYSTPFTFGPGTKVDIKSGGGGSEVQLVESGGGLVQPGGSLKLSCAASGFTFNKYAMNWVRQAPGKGLEWVARIRSKYNNYATYYADSVKDRFTISRDDSKNTAYLQMNNLKTEDTAVYYCVRHGNFGNSYISYWAYWGQGTLVTVSSGGGGSGGGGSGGGGSQTVVTQEPSLTVSPGGTVTLTCGSSTGAVTSGYYPNWVQQKPGQAPRGLIGGTKFLAPGTPARFSGSLLGGKAALTLSGVQPEDEAEYYCALWYSNRWVFGGGTKLTVL

SEQ ID NO: 216 - DNA, 1500 bp, Artificial Sequence
  MCSP-D2 VH-VL x H2C VH-VL
caggtgcagctggtccagtctggggctgaggtgaagaagcctggggcctcagtgaaggtctcctgcaaggcttctggatacaccttcaccggctactatatgcactgggtgcgacaggcccctggacaagggcttgagtggatgggatggatcaaccctaacagtggtggcacaagctacgcacagaagttccagggcagagtcaccatgactagggacacgtccacgagcacagtctacatggagctgagcaacctgagatctgacgacacggccgtgtattactgtgcgaaatcctgggtctcctggtttgcttcctggggtcaaggaaccttggtcaccgtctcctcaggtggtggtggttctggcggcggcggctccggtggtggtggttctgatatcgtgatgacccagtctccagactccctggctgtgtctctgggcgagagggccaccatcaactgcaagtccagccagagtgttttaaacagctccaacaataggaactacttagcttggtaccagcagaaaccaggacagcctcctaagctgctcatttactgggcatctacccgggaatccggggtccctgaccgattcagtggcagcgggtctgggacagatttcactctcaccatcagtggcctgcaggctgaagatgtggcagtttattactgtcagcaacattatagtactccattcacttttggccctgggaccaaagtggatatcaaatccggaggtggtggatccgaggtgcagctggtcgagtctggaggaggattggtgcagcctggagggtcattgaaactctcatgtgcagcctctggattcaccttcaataagtacgccatgaactgggtccgccaggctccaggaaagggtttggaatgggttgctcgcataagaagtaaatataataattatgcaacatattatgccgattcagtgaaagacaggttcaccatctccagagatgattcaaaaaacactgcctatctacaaatgaacaacttgaaaactgaggacactgccgtgtactactgtgtgagacatgggaacttcggtaatagctacatatcctactgggcttactggggccaagggactctggtcaccgtctcctcaggtggtggtggttctggcggcggcggctccggtggtggtggttctcagactgttgtgactcaggaaccttcactcaccgtatcacctggtggaacagtcacactcacttgtggctcctcgactggggctgttacatctggctactacccaaactgggtccaacaaaaaccaggtcaggcaccccgtggtctaataggtgggactaagttcctcgcccccggtactcctgccagattctcaggctccctgcttggaggcaaggctgccctcaccctctcaggggtacagccagaggatgaggcagaatattactgtgctctatggtacagcaaccgctgggtgttcggtggaggaaccaaactgactgtccta

SEQ ID NO: 217 - protein, 500 aa, Artificial Sequence
  MCSP-D2 VH-VL x F12Q VH-VL
QVQLVQSGAEVKKPGASVKVSCKASGYTFTGYYMHWVRQAPGQGLEWMGWINPNSGGTSYAQKFQGRVTMTRDTSTSTVYMELSNLRSDDTAVYYCAKSWVSWFASWGQGTLVTVSSGGGGSGGGGSGGGGSDIVMTQSPDSLAVSLGERATINCKSSQSVLNSSNNRNYLAWYQQKPGQPPKLLIYWASTRESGVPDRFSGSGSGTDFTLTISGLQAEDVAVYYCQQHYSTPFTFGPGTKVDIKSGGGGSEVQLVESGGGLVQPGGSLKLSCAASGFTFNSYAMNWVRQAPGKGLEWVARIRSKYNNYATYYADSVKGRFTISRDDSKNTAYLQMNNLKTEDTAVYYCVRHGNFGNSYVSWWAYWGQGTLVTVSSGGGGSGGGGSGGGGSQTVVTQEPSLTVSPGGTVTLTCGSSTGAVTSGNYPNWVQQKPGQAPRGLIGGTKFLAPGTPARFSGSLLGGKAALTLSGVQPEDEAEYYCVLWYSNRWVFGGGTKLTVL

SEQ ID NO: 218 - DNA, 1500 bp, Artificial Sequence
  MCSP-D2 VH-VL x F12Q VH-VL
caggtgcagctggtccagtctggggctgaggtgaagaagcctggggcctcagtgaaggtctcctgcaaggcttctggatacaccttcaccggctactatatgcactgggtgcgacaggcccctggacaagggcttgagtggatgggatggatcaaccctaacagtggtggcacaagctacgcacagaagttccagggcagagtcaccatgactagggacacgtccacgagcacagtctacatggagctgagcaacctgagatctgacgacacggccgtgtattactgtgcgaaatcctgggtctcctggtttgcttcctggggtcaaggaaccttggtcaccgtctcctcaggtggtggtggttctggcggcggcggctccggtggtggtggttctgatatcgtgatgacccagtctccagactccctggctgtgtctctgggcgagagggccaccatcaactgcaagtccagccagagtgttttaaacagctccaacaataggaactacttagcttggtaccagcagaaaccaggacagcctcctaagctgctcatttactgggcatctacccgggaatccggggtccctgaccgattcagtggcagcgggtctgggacagatttcactctcaccatcagtggcctgcaggctgaagatgtggcagtttattactgtcagcaacattatagtactccattcacttttggccctgggaccaaagtggatatcaaatccggaggtggtggatccgaggtgcagctggtcgagtctggaggaggattggtgcagcctggagggtcattgaaactctcatgtgcagcctctggattcaccttcaatagctacgccatgaactgggtccgccaggctccaggaaagggtttggaatgggttgctcgcataagaagtaaatataataattatgcaacatattatgccgattcagtgaaaggcaggttcaccatctccagagatgattcaaaaaacactgcctatctacaaatgaacaacttgaaaactgaggacactgccgtgtactactgtgtgagacatgggaacttcggtaatagctacgtttcctggtgggcttactggggccaagggactctggtcaccgtctcctcaggtggtggtggttctggcggcggcggctccggtggtggtggttctcagactgttgtgactcaggaaccttcactcaccgtatcacctggtggaacagtcacactcacttgtggctcctcgactggggctgttacatctggcaactacccaaactgggtccaacaaaaaccaggtcaggcaccccgtggtctaataggtgggactaagttcctcgcccccggtactcctgccagattctcaggctccctgcttggaggcaaggctgccctcaccctctcaggggtacagccagaggatgaggcagaatattactgtgttctatggtacagcaaccgctgggtgttcggtggaggaaccaaactgactgtccta

SEQ ID NO: 219 - protein, 500 aa, Artificial Sequence
  MCSP-D2 VH-VL x I2C VH-VL
QVQLVQSGAEVKKPGASVKVSCKASGYTFTGYYMHWVRQAPGQGLEWMGWINPNSGGTSYAQKFQGRVTMTRDTSTSTVYMELSNLRSDDTAVYYCAKSWVSWFASWGQGTLVTVSSGGGGSGGGGSGGGGSDIVMTQSPDSLAVSLGERATINCKSSQSVLNSSNNRNYLAWYQQKPGQPPKLLIYWASTRESGVPDRFSGSGSGTDFTLTISGLQAEDVAVYYCQQHYSTPFTFGPGTKVDIKSGGGGSEVQLVESGGGLVQPGGSLKLSCAASGFTFNKYAMNWVRQAPGKGLEWVARIRSKYNNYATYYADSVKDRFTISRDDSKNTAYLQMNNLKTEDTAVYYCVRHGNFGNSYISYWAYWGQGTLVTVSSGGGGSGGGGSGGGGSQTVVTQEPSLTVSPGGTVTLTCGSSTGAVTSGNYPNWVQQKPGQAPRGLIGGTKFLAPGTPARFSGSLLGGKAALTLSGVQPEDEAEYYCVLWYSNRWVFGGGTKLTVL

SEQ ID NO: 220 - DNA, 1500 bp, Artificial Sequence
  MCSP-D2 VH-VL x I2C VH-VL
caggtgcagctggtccagtctggggctgaggtgaagaagcctggggcctcagtgaaggtctcctgcaaggcttctggatacaccttcaccggctactatatgcactgggtgcgacaggcccctggacaagggcttgagtggatgggatggatcaaccctaacagtggtggcacaagctacgcacagaagttccagggcagagtcaccatgactagggacacgtccacgagcacagtctacatggagctgagcaacctgagatctgacgacacggccgtgtattactgtgcgaaatcctgggtctcctggtttgcttcctggggtcaaggaaccttggtcaccgtctcctcaggtggtggtggttctggcggcggcggctccggtggtggtggttctgatatcgtgatgacccagtctccagactccctggctgtgtctctgggcgagagggccaccatcaactgcaagtccagccagagtgttttaaacagctccaacaataggaactacttagcttggtaccagcagaaaccaggacagcctcctaagctgctcatttactgggcatctacccgggaatccggggtccctgaccgattcagtggcagcgggtctgggacagatttcactctcaccatcagtggcctgcaggctgaagatgtggcagtttattactgtcagcaacattatagtactccattcacttttggccctgggaccaaagtggatatcaaatccggaggtggtggatccgaggtgcagctggtcgagtctggaggaggattggtgcagcctggagggtcattgaaactctcatgtgcagcctctggattcaccttcaataagtacgccatgaactgggtccgccaggctccaggaaagggtttggaatgggttgctcgcataagaagtaaatataataattatgcaacatattatgccgattcagtgaaagacaggttcaccatctccagagatgattcaaaaaacactgcctatctacaaatgaacaacttgaaaactgaggacactgccgtgtactactgtgtgagacatgggaacttcggtaatagctacatatcctactgggcttactggggccaagggactctggtcaccgtctcctcaggtggtggtggttctggcggcggcggctccggtggtggtggttctcagactgttgtgactcaggaaccttcactcaccgtatcacctggtggaacagtcacactcacttgtggctcctcgactggggctgttacatctggcaactacccaaactgggtccaacaaaaaccaggtcaggcaccccgtggtctaataggtgggactaagttcctcgcccccggtactcctgccagattctcaggctccctgcttggaggcaaggctgccctcaccctctcaggggtacagccagaggatgaggcagaatattactgtgttctatggtacagcaaccgctgggtgttcggtggaggaaccaaactgactgtccta

SEQ ID NO: 221 - protein, 500 aa, Artificial Sequence
  MCSP-D2 VH-VL-P x H2C VH-VL-P
QVQLVQSGAEVKKPGASVKVSCKASGYTFTGYYMHWVRQAPGQGLEWMGWINPNSGGTSYAQKFQGRVTMTRDTSTSTVYMELSNLRSDDTAVYYCAKSWVSWFASWGQGTLVTVSSGGGGSGGGGSGGGGSELVMTQSPDSLAVSLGERATINCKSSQSVLNSSNNRNYLAWYQQKPGQPPKLLIYWASTRESGVPDRFSGSGSGTDFTLTISGLQAEDVAVYYCQQHYSTPFTFGPGTKVDIKSGGGGSEVQLLESGGGLVQPGGSLKLSCAASGFTFNKYAMNWVRQAPGKGLEWVARIRSKYNNYATYYADSVKDRFTISRDDSKNTAYLQMNNLKTEDTAVYYCVRHGNFGNSYISYWAYWGQGTLVTVSSGGGGSGGGGSGGGGSELVVTQEPSLTVSPGGTVTLTCGSSTGAVTSGYYPNWVQQKPGQAPRGLIGGTKFLAPGTPARFSGSLLGGKAALTLSGVQPEDEAEYYCALWYSNRWVFGGGTKLTVL

SEQ ID NO: 222 - DNA, 1500 bp, Artificial Sequence
  MCSP-D2 VH-VL-P x H2C VH-VL-P
caggtgcagctggtccagtctggggctgaggtgaagaagcctggggcctcagtgaaggtctcctgcaaggcttctggatacaccttcaccggctactatatgcactgggtgcgacaggcccctggacaagggcttgagtggatgggatggatcaaccctaacagtggtggcacaagctacgcacagaagttccagggcagagtcaccatgactagggacacgtccacgagcacagtctacatggagctgagcaacctgagatctgacgacacggccgtgtattactgtgcgaaatcctgggtctcctggtttgcttcctggggtcaaggaaccttggtcaccgtctcctcaggtggtggtggttctggcggcggcggctccggtggtggtggttctgagctcgtgatgacccagtctccagactccctggctgtgtctctgggcgagagggccaccatcaactgcaagtccagccagagtgttttaaacagctccaacaataggaactacttagcttggtaccagcagaaaccaggacagcctcctaagctgctcatttactgggcatctacccgggaatccggggtccctgaccgattcagtggcagcgggtctgggacagatttcactctcaccatcagtggcctgcaggctgaagatgtggcagtttattactgtcagcaacattatagtactccattcacttttggccctgggaccaaagtggatatcaaatccggaggtggtggatccgaggtgcagctgctcgagtctggaggaggattggtgcagcctggagggtcattgaaactctcatgtgcagcctctggattcaccttcaataagtacgccatgaactgggtccgccaggctccaggaaagggtttggaatgggttgctcgcataagaagtaaatataataattatgcaacatattatgccgattcagtgaaagacaggttcaccatctccagagatgattcaaaaaacactgcctatctacaaatgaacaacttgaaaactgaggacactgccgtgtactactgtgtgagacatgggaacttcggtaatagctacatatcctactgggcttactggggccaagggactctggtcaccgtctcctcaggtggtggtggttctggcggcggcggctccggtggtggtggttctgagctcgttgtgactcaggaaccttcactcaccgtatcacctggtggaacagtcacactcacttgtggctcctcgactggggctgttacatctggctactacccaaactgggtccaacaaaaaccaggtcaggcaccccgtggtctaataggtgggactaagttcctcgcccccggtactcctgccagattctcaggctccctgcttggaggcaaggctgccctcaccctctcaggggtacagccagaggatgaggcagaatattactgtgctctatggtacagcaaccgctgggtgttcggtggaggaaccaaactgactgtccta

SEQ ID NO: 223 - protein, 499 aa, Artificial Sequence
  MCSP-F9 VH-VL x H2C VH-VL
QVQLQESGPGLVKPSETLSLTCVVSGGSISSSNWWSWVRQPPGKGLEWLGTIYYNGNTYYNPSLKSRVTISVDTSKNQFSLRLSSVTAADTAVYYCAKSWVSWFASWGQGTLVTVSSGGGGSGGGGSGGGGSDIVMTQSPDSLAVSLGERATINCKSSQSVLSSSNNKNYLNWYQQKPGQPPKLLIYWASTRESGVPDRFSGSGSGTDFTLTISSLQAEDVAVYYCQQHYSVPFTFGPGTKVDIKGGGGSEVQLVESGGGLVQPGGSLKLSCAASGFTFNKYAMNWVRQAPGKGLEWVARIRSKYNNYATYYADSVKDRFTISRDDSKNTAYLQMNNLKTEDTAVYYCVRHGNFGNSYISYWAYWGQGTLVTVSSGGGGSGGGGSGGGGSQTVVTQEPSLTVSPGGTVTLTCGSSTGAVTSGYYPNWVQQKPGQAPRGLIGGTKFLAPGTPARFSGSLLGGKAALTLSGVQPEDEAEYYCALWYSNRWVFGGGTKLTVL

SEQ ID NO: 224 - DNA, 1497 bp, Artificial Sequence
  MCSP-F9 VH-VL x H2C VH-VL
caggtgcagctgcaagagtctggcccaggactggtgaagccttcggagaccctgtccctcacctgcgttgtctctggtggctccatcagcagtagtaactggtggagctgggtccgccagcccccagggaagggactggagtggcttgggactatctattataatgggaatacctactacaacccgtccctcaagagtcgagtcaccatctccgtagacacgtccaagaaccagttctccctgaggctgagctctgtgaccgccgcagacacggccgtgtattactgtgcgaaatcctgggtctcctggtttgcttcctggggtcaaggaaccttggtcaccgtctcctcaggtggtggtggttctggcggcggcggctccggtggtggtggttctgatatcgtgatgacacagtctccagactccctggctgtgtctctgggcgagagggccaccatcaactgcaagtccagccagagtgtcttatccagctccaacaataagaactacttaaattggtaccagcagaaaccaggacagcctcctaagttgctcatttactgggcatctacccgggaatccggggtccctgaccgattcagtggcagcgggtctgggacagatttcactctcaccatcagcagcctgcaggctgaagatgtggcagtttattactgtcagcaacattatagtgttccattcactttcggccctgggaccaaagtggatatcaaaggaggtggtggctccgaggtgcagctggtcgagtctggaggaggattggtgcagcctggagggtcattgaaactctcatgtgcagcctctggattcaccttcaataagtacgccatgaactgggtccgccaggctccaggaaagggtttggaatgggttgctcgcataagaagtaaatataataattatgcaacatattatgccgattcagtgaaagacaggttcaccatctccagagatgattcaaaaaacactgcctatctacaaatgaacaacttgaaaactgaggacactgccgtgtactactgtgtgagacatgggaacttcggtaatagctacatatcctactgggcttactggggccaagggactctggtcaccgtctcctcaggtggtggtggttctggcggcggcggctccggtggtggtggttctcagactgttgtgactcaggaaccttcactcaccgtatcacctggtggaacagtcacactcacttgtggctcctcgactggggctgttacatctggctactacccaaactgggtccaacaaaaaccaggtcaggcaccccgtggtctaataggtgggactaagttcctcgcccccggtactcctgccagattctcaggctccctgcttggaggcaaggctgccctcaccctctcaggggtacagccagaggatgaggcagaatattactgtgctctatggtacagcaaccgctgggtgttcggtggaggaaccaaactgactgtccta

SEQ ID NO: 225 - protein, 500 aa, Artificial Sequence
  MCSP-F9 VH-VL-P x H2C VH-VL-P
EVQLQESGPGLVKPSETLSLTCVVSGGSISSSNWWSWVRQPPGKGLEWLGTIYYNGNTYYNPSLKSRVTISVDTSKNQFSLRLSSVTAADTAVYYCAKSWVSWFASWGQGTLVTVSSGGGGSGGGGSGGGGSELVMTQSPDSLAVSLGERATINCKSSQSVLSSSNNKNYLNWYQQKPGQPPKLLIYWASTRESGVPDRFSGSGSGTDFTLTISSLQAEDVAVYYCQQHYSVPFTFGPGTKVDIKSGGGGSEVQLLESGGGLVQPGGSLKLSCAASGFTFNKYAMNWVRQAPGKGLEWVARIRSKYNNYATYYADSVKDRFTISRDDSKNTAYLQMNNLKTEDTAVYYCVRHGNFGNSYISYWAYWGQGTLVTVSSGGGGSGGGGSGGGGSELVVTQEPSLTVSPGGTVTLTCGSSTGAVTSGYYPNWVQQKPGQAPRGLIGGTKFLAPGTPARFSGSLLGGKAALTLSGVQPEDEAEYYCALWYSNRWVFGGGTKLTVL

SEQ ID NO: 226 - DNA, 1500 bp, Artificial Sequence
  MCSP-F9 VH-VL-P x H2C VH-VL-P
gaggtgcagctgcaagagtctggcccaggactggtgaagccttcggagaccctgtccctcacctgcgttgtctctggtggctccatcagcagtagtaactggtggagctgggtccgccagcccccagggaagggactggagtggcttgggactatctattataatgggaatacctactacaacccgtccctcaagagtcgagtcaccatctccgtagacacgtccaagaaccagttctccctgaggctgagctctgtgaccgccgcagacacggccgtgtattactgtgcgaaatcctgggtctcctggtttgcttcctggggtcaaggaaccttggtcaccgtctcctcaggtggtggtggttctggcggcggcggctccggtggtggtggttctgagctcgtgatgacacagtctccagactccctggctgtgtctctgggcgagagggccaccatcaactgcaagtccagccagagtgtcttatccagctccaacaataagaactacttaaattggtaccagcagaaaccaggacagcctcctaagttgctcatttactgggcatctacccgggaatccggggtccctgaccgattcagtggcagcgggtctgggacagatttcactctcaccatcagcagcctgcaggctgaagatgtggcagtttattactgtcagcaacattatagtgttccattcactttcggccctgggaccaaagtggatatcaaatccggaggtggtggatccgaggtgcagctgctcgagtctggaggaggattggtgcagcctggagggtcattgaaactctcatgtgcagcctctggattcaccttcaataagtacgccatgaactgggtccgccaggctccaggaaagggtttggaatgggttgctcgcataagaagtaaatataataattatgcaacatattatgccgattcagtgaaagacaggttcaccatctccagagatgattcaaaaaacactgcctatctacaaatgaacaacttgaaaactgaggacactgccgtgtactactgtgtgagacatgggaacttcggtaatagctacatatcctactgggcttactggggccaagggactctggtcaccgtctcctcaggtggtggtggttctggcggcggcggctccggtggtggtggttctgagctcgttgtgactcaggaaccttcactcaccgtatcacctggtggaacagtcacactcacttgtggctcctcgactggggctgttacatctggctactacccaaactgggtccaacaaaaaccaggtcaggcaccccgtggtctaataggtgggactaagttcctcgcccccggtactcctgccagattctcaggctccctgcttggaggcaaggctgccctcaccctctcaggggtacagccagaggatgaggcagaatattactgtgctctatggtacagcaaccgctgggtgttcggtggaggaaccaaactgactgtccta

SEQ ID NO: 227 - protein, 500 aa, Artificial Sequence
  MCSP-F9 VH-VL-P x G4H VH-VL-P
EVQLQESGPGLVKPSETLSLTCVVSGGSISSSNWWSWVRQPPGKGLEWLGTIYYNGNTYYNPSLKSRVTISVDTSKNQFSLRLSSVTAADTAVYYCAKSWVSWFASWGQGTLVTVSSGGGGSGGGGSGGGGSELVMTQSPDSLAVSLGERATINCKSSQSVLSSSNNKNYLNWYQQKPGQPPKLLIYWASTRESGVPDRFSGSGSGTDFTLTISSLQAEDVAVYYCQQHYSVPFTFGPGTKVDIKSGGGGSEVQLLESGGGLVQPGGSLKLSCAASGFTFNRYAMNWVRQAPGKGLEWVARIRSKYNNYATYYADSVKGRFTISRDDSKNTAYLQMNNLKTEDTAVYYCVRHGNFGNSYLSYFAYWGQGTLVTVSSGGGGSGGGGSGGGGSELVVTQEPSLTVSPGGTVTLTCGSSTGAVTSGYYPNWVQQKPGQAPRGLIGGTKFLAPGTPARFSGSLLGGKAALTLSGVQPEDEAEYYCALWYSNRWVFGGGTKLTVL

SEQ ID NO: 228 - DNA, 1500 bp, Artificial Sequence
  MCSP-F9 VH-VL-P x G4H VH-VL-P
gaggtgcagctgcaagagtctggcccaggactggtgaagccttcggagaccctgtccctcacctgcgttgtctctggtggctccatcagcagtagtaactggtggagctgggtccgccagcccccagggaagggactggagtggcttgggactatctattataatgggaatacctactacaacccgtccctcaagagtcgagtcaccatctccgtagacacgtccaagaaccagttctccctgaggctgagctctgtgaccgccgcagacacggccgtgtattactgtgcgaaatcctgggtctcctggtttgcttcctggggtcaaggaaccttggtcaccgtctcctcaggtggtggtggttctggcggcggcggctccggtggtggtggttctgagctcgtgatgacacagtctccagactccctggctgtgtctctgggcgagagggccaccatcaactgcaagtccagccagagtgtcttatccagctccaacaataagaactacttaaattggtaccagcagaaaccaggacagcctcctaagttgctcatttactgggcatctacccgggaatccggggtccctgaccgattcagtggcagcgggtctgggacagatttcactctcaccatcagcagcctgcaggctgaagatgtggcagtttattactgtcagcaacattatagtgttccattcactttcggccctgggaccaaagtggatatcaaatccggaggtggtggatccgaggtgcagctgctcgagtctggaggaggattggtgcagcctggagggtcattgaaactctcatgtgcagcctctggattcaccttcaatcgctacgccatgaactgggtccgccaggctccaggaaagggtttggaatgggttgctcgcataagaagtaaatataataattatgcaacatattatgccgattcagtgaaagggaggttcaccatctccagagatgattcaaaaaacactgcctatctacaaatgaacaacttgaaaactgaggacactgccgtgtactactgtgtgagacatgggaacttcggtaatagctacttatcctacttcgcttactggggccaagggactctggtcaccgtctcctcaggtggtggtggttctggcggcggcggctccggtggtggtggttctgagctcgttgtgactcaggaaccttcactcaccgtatcacctggtggaacagtcacactcacttgtggctcctcgactggggctgttacatctggctactacccaaactgggtccaacaaaaaccaggtcaggcaccccgtggtctaataggtgggactaagttcctcgcccccggtactcctgccagattctcaggctccctgcttggaggcaaggctgccctcaccctctcaggggtacagccagaggatgaggcagaatattactgtgctctatggtacagcaaccgctgggtgttcggtggaggaaccaaactgactgtccta

SEQ ID NO: 229 - protein, 267 aa, Artificial Sequence
  1-27 CD3 epsilon-Fc
QDGNEEMGGITQTPYKVSISGTTVILTSGEPKSCDKTHTCPPCPAPELLGGPSVFLFPPKPKDTLMISRTPEVTCVVVDVSHEDPEVKFNWYVDGVEVHNAKTKPREEQYNSTYRVVSVLTVLHQDWLNGKEYKCKVSNKALPAPIEKTISKAKGQPREPQVYTLPPSREEMTKNQVSLTCLVKGFYPSDIAVEWESNGQPENNYKTTPPVLDSDGSFFLYSKLTVDKSRWQQGNVFSCSVMHEALHNHYTQKSLSLSPGKHHHHHH

SEQ ID NO: 230 - DNA, 858 bp, Artificial Sequence
  1-27 CD3 epsilon-Fc
atgggatggagctgtatcatcctcttcttggtagcaacagctacaggtgtacactcccaagatggtaatgaagaaatgggtggtattacacagacaccatataaagtctccatctctggaaccacagtaatattgacatccggagagcccaaatcttgtgacaaaactcacacatgcccaccgtgcccagcacctgaactcctggggggaccgtcagtcttcctcttccccccaaaacccaaggacaccctcatgatctcccggacccctgaggtcacatgcgtggtggtggacgtgagccacgaagaccctgaggtcaagttcaactggtacgtggacggcgtggaggtgcataatgccaagacaaagccgcgggaggagcagtacaacagcacgtaccgtgtggtcagcgtcctcaccgtcctgcaccaggactggctgaatggcaaggagtacaagtgcaaggtctccaacaaagccctcccagcccccatcgagaaaaccatctccaaagccaaagggcagccccgagaaccacaggtgtacaccctgcccccatcccgggaggagatgaccaagaaccaggtcagcctgacctgcctggtcaaaggcttctatcccagcgacatcgccgtggagtgggagagcaatgggcagccggagaacaactacaagaccacgcctcccgtgctggactccgacggctccttcttcctctatagcaagctcaccgtggacaagagcaggtggcagcaggggaacgtcttctcatgctccgtgatgcatgaggctctgcacaaccactacacgcagaagagcctctccctgtccccgggtaaacatcatcaccatcatcat

SEQ ID NO: 231 - protein, 333 aa, Artificial Sequence
  human 1-27 CD3 epsilon-EpCAM
QDGNEEMGGITQTPYKVSISGTTVILTDYKDDDDKTASFAAAQKECVCENYKLAVNCFLNDNGQCQCTSIGAQNTVLCSKLAAKCLVMKAEMNGSKLGRRAKPEGALQNNDGLYDPDCDESGLFKAKQCNGTSTCWCVNTAGVRRTDKDTEITCSERVRTYWIIIELKHKAREKPYDVQSLRTALEEAIKTRYQLDPKFITNILYEDNVITIDLVQNSSQKTQNDVDIADVAYYFEKDVKGESLFHSKKMDLRVNGEQLDLDPGQTLIYYVDEKAPEFSMQGLKAGVIAVIVVVVIAIVAGIVVLVISRKKRMAKYEKAEIKEMGEMHRELNA

SEQ ID NO: 232 - DNA, 1056 bp, Artificial Sequence
  human 1-27 CD3 epsilon-EpCAM
atgggatggagctgtatcatcctcttcttggtagcaacagctacaggtgtacactcccaagatggtaatgaagaaatgggtggtattacacagacaccatataaagtctccatctctggaaccacagtaatattgacagattacaaggacgacgatgacaagactgcgagttttgccgcagctcagaaagaatgtgtctgtgaaaactacaagctggccgtaaactgctttttgaatgacaatggtcaatgccagtgtacttcgattggtgcacaaaatactgtcctttgctcaaagctggctgccaaatgtttggtgatgaaggcagaaatgaacggctcaaaacttgggagaagagcgaaacctgaaggggctctccagaacaatgatggcctttacgatcctgactgcgatgagagcgggctctttaaggccaagcagtgcaacggcacctccacgtgctggtgtgtgaacactgctggggtcagaagaactgacaaggacactgaaataacctgctctgagcgagtgagaacctactggatcatcattgaattaaaacacaaagcaagagaaaaaccttatgatgttcaaagtttgcggactgcacttgaggaggcgatcaaaacgcgttatcaactggatccaaaatttatcacaaatattttgtatgaggataatgttatcactattgatctggttcaaaattcttctcagaaaactcagaatgatgtggacatagctgatgtggcttattattttgaaaaagatgttaaaggtgaatccttgtttcattctaagaaaatggacctgagagtaaatggggaacaactggatctggatcctggtcaaactttaatttattatgtcgatgaaaaagcacctgaattctcaatgcagggtctaaaagctggtgttattgctgttattgtggttgtggtgatagcaattgttgctggaattgttgtgctggttatttccagaaagaagagaatggcaaagtatgagaaggctgagataaaggagatgggtgagatgcatagggaactcaatgca

SEQ ID NO: 233 - protein, 333 aa, Artificial Sequence
  marmoset 1-27 CD3 epsilon-EpCAM
QDGNEEMGDTTQNPYKVSISGTTVTLTDYKDDDDKTASFAAAQKECVCENYKLAVNCFLNDNGQCQCTSIGAQNTVLCSKLAAKCLVMKAEMNGSKLGRRAKPEGALQNNDGLYDPDCDESGLFKAKQCNGTSTCWCVNTAGVRRTDKDTEITCSERVRTYWIIIELKHKAREKPYDVQSLRTALEEAIKTRYQLDPKFITNILYEDNVITIDLVQNSSQKTQNDVDIADVAYYFEKDVKGESLFHSKKMDLRVNGEQLDLDPGQTLIYYVDEKAPEFSMQGLKAGVIAVIVVVVIAIVAGIVVLVISRKKRMAKYEKAEIKEMGEMHRELNA

SEQ ID NO: 234 - DNA, 1056 bp, Artificial Sequence
  marmoset 1-27 CD3 epsilon-EpCAM
atgggatggagctgtatcatcctcttcttggtagcaacagctacaggtgtacactcccaggacggtaatgaagaaatgggtgatactacacagaacccatataaagtttccatctcaggaaccacagtaacactgacagattacaaggacgacgatgacaagactgcgagttttgccgcagctcagaaagaatgtgtctgtgaaaactacaagctggccgtaaactgctttttgaatgacaatggtcaatgccagtgtacttcgattggtgcacaaaatactgtcctttgctcaaagctggctgccaaatgtttggtgatgaaggcagaaatgaacggctcaaaacttgggagaagagcgaaacctgaaggggctctccagaacaatgatggcctttacgatcctgactgcgatgagagcgggctctttaaggccaagcagtgcaacggcacctccacgtgctggtgtgtgaacactgctggggtcagaagaactgacaaggacactgaaataacctgctctgagcgagtgagaacctactggatcatcattgaattaaaacacaaagcaagagaaaaaccttatgatgttcaaagtttgcggactgcacttgaggaggcgatcaaaacgcgttatcaactggatccaaaatttatcacaaatattttgtatgaggataatgttatcactattgatctggttcaaaattcttctcagaaaactcagaatgatgtggacatagctgatgtggcttattattttgaaaaagatgttaaaggtgaatccttgtttcattctaagaaaatggacctgagagtaaatggggaacaactggatctggatcctggtcaaactttaatttattatgtcgatgaaaaagcacctgaattctcaatgcagggtctaaaagctggtgttattgctgttattgtggttgtggtgatagcaattgttgctggaattgttgtgctggttatttccagaaagaagagaatggcaaagtatgagaaggctgagataaaggagatgggtgagatgcatagggaactcaatgca

SEQ ID NO: 235 - protein, 333 aa, Artificial Sequence; identical to SEQ ID NO: 233
  tamarin 1-27 CD3 epsilon-EpCAM

SEQ ID NO: 236 - DNA, 1056 bp, Artificial Sequence; identical to SEQ ID NO: 234
  tamarin 1-27 CD3 epsilon-EpCAM

SEQ ID NO: 237 - protein, 333 aa, Artificial Sequence
  squirrel monkey 1-27 CD3 epsilon-EpCAM
QDGNEEIGDTTQNPYKVSISGTTVTLTDYKDDDDKTASFAAAQKECVCENYKLAVNCFLNDNGQCQCTSIGAQNTVLCSKLAAKCLVMKAEMNGSKLGRRAKPEGALQNNDGLYDPDCDESGLFKAKQCNGTSTCWCVNTAGVRRTDKDTEITCSERVRTYWIIIELKHKAREKPYDVQSLRTALEEAIKTRYQLDPKFITNILYEDNVITIDLVQNSSQKTQNDVDIADVAYYFEKDVKGESLFHSKKMDLRVNGEQLDLDPGQTLIYYVDEKAPEFSMQGLKAGVIAVIVVVVIAIVAGIVVLVISRKKRMAKYEKAEIKEMGEMHRELNA

SEQ ID NO: 238 - DNA, 1056 bp, Artificial Sequence
  squirrel monkey 1-27 CD3 epsilon-EpCAM
atgggatggagctgtatcatcctcttcttggtagcaacagctacaggtgtacactcccaggacggtaatgaagagattggtgatactacccagaacccatataaagtttccatctcaggaaccacagtaacactgacagattacaaggacgacgatgacaagactgcgagttttgccgcagctcagaaagaatgtgtctgtgaaaactacaagctggccgtaaactgctttttgaatgacaatggtcaatgccagtgtacttcgattggtgcacaaaatactgtcctttgctcaaagctggctgccaaatgtttggtgatgaaggcagaaatgaacggctcaaaacttgggagaagagcgaaacctgaaggggctctccagaacaatgatggcctttacgatcctgactgcgatgagagcgggctctttaaggccaagcagtgcaacggcacctccacgtgctggtgtgtgaacactgctggggtcagaagaactgacaaggacactgaaataacctgctctgagcgagtgagaacctactggatcatcattgaattaaaacacaaagcaagagaaaaaccttatgatgttcaaagtttgcggactgcacttgaggaggcgatcaaaacgcgttatcaactggatccaaaatttatcacaaatattttgtatgaggataatgttatcactattgatctggttcaaaattcttctcagaaaactcagaatgatgtggacatagctgatgtggcttattattttgaaaaagatgttaaaggtgaatccttgtttcattctaagaaaatggacctgagagtaaatggggaacaactggatctggatcctggtcaaactttaatttattatgtcgatgaaaaagcacctgaattctcaatgcagggtctaaaagctggtgttattgctgttattgtggttgtggtgatagcaattgttgctggaattgttgtgctggttatttccagaaagaagagaatggcaaagtatgagaaggctgagataaaggagatgggtgagatgcatagggaactcaatgca

SEQ ID NO: 239 - protein, 333 aa, Artificial Sequence
  swine 1-27 CD3 epsilon-EpCAM
QEDIERPDEDTQKTFKVSISGDKVELTDYKDDDDKTASFAAAQKECVCENYKLAVNCFLNDNGQCQCTSIGAQNTVLCSKLAAKCLVMKAEMNGSKLGRRAKPEGALQNNDGLYDPDCDESGLFKAKQCNGTSTCWCVNTAGVRRTDKDTEITCSERVRTYWIIIELKHKAREKPYDVQSLRTALEEAIKTRYQLDPKFITNILYEDNVITIDLVQNSSQKTQNDVDIADVAYYFEKDVKGESLFHSKKMDLRVNGEQLDLDPGQTLIYYVDEKAPEFSMQGLKAGVIAVIVVVVIAIVAGIVVLVISRKKRMAKYEKAEIKEMGEMHRELNA

SEQ ID NO: 240 - DNA, 1056 bp, Artificial Sequence
  swine 1-27 CD3 epsilon-EpCAM
atgggatggagctgtatcatcctcttcttggtagcaacagctacaggtgtacactcccaagaagacattgaaagaccagatgaagatacacagaaaacatttaaagtctccatctctggagacaaagtagagctgacagattacaaggacgacgatgacaagactgcgagttttgccgcagctcagaaagaatgtgtctgtgaaaactacaagctggccgtaaactgctttttgaatgacaatggtcaatgccagtgtacttcgattggtgcacaaaatactgtcctttgctcaaagctggctgccaaatgtttggtgatgaaggcagaaatgaacggctcaaaacttgggagaagagcgaaacctgaaggggctctccagaacaatgatggcctttacgatcctgactgcgatgagagcgggctctttaaggccaagcagtgcaacggcacctccacgtgctggtgtgtgaacactgctggggtcagaagaactgacaaggacactgaaataacctgctctgagcgagtgagaacctactggatcatcattgaattaaaacacaaagcaagagaaaaaccttatgatgttcaaagtttgcggactgcacttgaggaggcgatcaaaacgcgttatcaactggatccaaaatttatcacaaatattttgtatgaggataatgttatcactattgatctggttcaaaattcttctcagaaaactcagaatgatgtggacatagctgatgtggcttattattttgaaaaagatgttaaaggtgaatccttgtttcattctaagaaaatggacctgagagtaaatggggaacaactggatctggatcctggtcaaactttaatttattatgtcgatgaaaaagcacctgaattctcaatgcagggtctaaaagctggtgttattgctgttattgtggttgtggtgatagcaattgttgctggaattgttgtgctggttatttccagaaagaagagaatggcaaagtatgagaaggctgagataaaggagatgggtgagatgcatagggaactcaatgca

SEQ ID NO: 241 - protein, 186 aa, Homo sapiens
QDGNEEMGGITQTPYKVSISGTTVILTCPQYPGSEILWQHNDKNIGGDEDDKNIGSDEDHLSLKEFSELEQSGYYVCYPRGSKPEDANFYLYLRARVCENCMEMDVMSVATIVIVDICITGGLLLLVYYWSKNRKAKAKPVTRGAGAGGRQRGQNKERPPPVPNPDYEPIRKGQRDLYSGLNQRRI

SEQ ID NO: 242 - DNA, 621 bp, Homo sapiens
atgcagtcgggcactcactggagagttctgggcctctgcctcttatcagttggcgtttgggggcaagatggtaatgaagaaatgggtggtattacacagacaccatataaagtctccatctctggaaccacagtaatattgacatgccctcagtatcctggatctgaaatactatggcaacacaatgataaaaacataggcggtgatgaggatgataaaaacataggcagtgatgaggatcacctgtcactgaaggaattttcagaattggagcaaagtggttattatgtctgctaccccagaggaagcaaaccagaagatgcgaacttttatctctacctgagggcacgcgtgtgtgagaactgcatggagatggatgtgatgtcggtggccacaattgtcatagtggacatctgcatcactgggggcttgctgctgctggtttactactggagcaagaatagaaaggccaaggccaagcctgtgacacgaggagcgggtgctggcggcaggcaaaggggacaaaacaaggagaggccaccacctgttcccaacccagactatgagcccatccggaaaggccagcgggacctgtattctggcctgaatcagagacgcatc

SEQ ID NO: 243 - protein, 19 aa, Artificial Sequence
  19 amino acid immunoglobulin leader peptide
MGWSCIILFLVATATGVHS

SEQ ID NO: 244 - DNA, 57 bp, Artificial Sequence
  19 amino acid immunoglobulin leader peptide coding sequence
atgggatggagctgtatcatcctcttcttggtagcaacagctacaggtgtacactcc

SEQ ID NO: 245 - protein, 324 aa, Mus sp.
AKTTPPSVYPLAPGSAAQTNSMVTLGCLVKGYFPEPVTVTWNSGSLSSGVHTFPAVLQSDLYTLSSSVTVPSSTWPSETVTCNVAHPASSTKVDKKIVPRDCGCKPCICTVPEVSSVFIFPPKPKDVLTITLTPKVTCVVVDISKDDPEVQFSWFVDDVEVHTAQTQPREEQFNSTFRSVSELPIMHQDWLNGKEFKCRVNSAAFPAPIEKTISKTKGRPKAPQVYTIPPPKEQMAKDKVSLTCMITDFFPEDITVEWQWNGQPAENYKNTQPIMDTDGSYFVYSKLNVQKSNWEAGNTFTCSVLHEGLHNHHTEKSLSHSPGK

SEQ ID NO: 246 - DNA, 972 bp, Mus sp.
gccaaaacgacacccccatctgtctatccactggcccctggatctgctgcccaaactaactccatggtgaccctgggatgcctggtcaagggctatttccctgagccagtgacagtgacctggaactctggatccctgtccagcggtgtgcacaccttcccagctgtcctgcagtctgacctctacactctgagcagctcagtgactgtcccctccagcacctggcccagcgagaccgtcacctgcaacgttgcccacccggccagcagcaccaaggtggacaagaaaattgtgcccagggattgtggttgtaagccttgcatatgtacagtcccagaagtatcatctgtcttcatcttccccccaaagcccaaggatgtgctcaccattactctgactcctaaggtcacgtgtgttgtggtagacatcagcaaggatgatcccgaggtccagttcagctggtttgtagatgatgtggaggtgcacacagctcagacgcaaccccgggaggagcagttcaacagcactttccgctcagtcagtgaacttcccatcatgcaccaggactggctcaatggcaaggagttcaaatgcagggtcaacagtgcagctttccctgcccccatcgagaaaaccatctccaaaaccaaaggcagaccgaaggctccacaggtgtacaccattccacctcccaaggagcagatggccaaggataaagtcagtctgacctgcatgataacagacttcttccctgaagacattactgtggagtggcagtggaatgggcagccagcggagaactacaagaacactcagcccatcatggacacagatggctcttacttcgtctacagcaagctcaatgtgcagaagagcaactgggaggcaggaaatactttcacctgctctgtgttacatgagggcctgcacaaccaccatactgagaagagcctctcccactctcctggtaaa

SEQ ID NO: 247 - protein, 106 aa, Homo sapiens
GQPKAAPSVTLFPPSSEELQANKATLVCLISDFYPGAVTVAWKADSSPVKAGVETTTPSKQSNNKYAASSYLSLTPEQWKSHKSYSCQVTHEGSTVEKTVAPTECS

SEQ ID NO: 248 - DNA, 318 bp, Homo sapiens
ggtcagcccaaggctgccccctcggtcactctgttcccaccctcctctgaggagcttcaagccaacaaggccacactggtgtgtctcataagtgacttctacccgggagccgtgacagtggcctggaaggcagatagcagccccgtcaaggcgggagtggagaccaccacaccctccaaacaaagcaacaacaagtacgcggccagcagctacctgagcctgacgcctgagcagtggaagtcccacaaaagctacagctgccaggtcacgcatgaagggagcaccgtggagaagacagtggcccctacagaatgttca

SEQ ID NO: 249 - protein, 800 aa, Homo sapiens
DYKDDDDKSRTRSGSQLDGGLVLFSHRGTLDGGFRFRLSDGEHTSPGHFFRVTAQKQVLLSLKGSQTLTVCPGSVQPLSSQTLRASSSAGTDPQLLLYRVVRGPQLGRLFHAQQDSTGEALVNFTQAEVYAGNILYEHEMPPEPFWEAHDTLELQLSSPPARDVAATLAVAVSFEAACPQRPSHLWKNKGLWVPEGQRARITVAALDASNLLASVPSPQRSEHDVLFQVTQFPSRGQLLVSEEPLHAGQPHFLQSQLAAGQLVYAHGGGGTQQDGFHFRAHLQGPAGASVAGPQTSEAFAITVRDVNERPPQPQASVPLRLTRGSRAPISRAQLSVVDPDSAPGEIEYEVQRAPHNGFLSLVGGGLGPVTRFTQADVDSGRLAFVANGSSVAGIFQLSMSDGASPPLPMSLAVDILPSAIEVQLRAPLEVPQALGRSSLSQQQLRVVSDREEPEAAYRLIQGPQYGHLLVGGRPTSAFSQFQIDQGEVVFAFTNSSSSHDHFRVLALARGVNASAVVNVTVRALLHVWAGGPWPQGATLRLDPTVLDAGELANRTDSVPRFRLLEGPRHGRVVRVPRARTEPGGSQLVEQFTQQDLEDGRLGLEVGRPEGRAPGPAGDSLTLELWAQGVPPAVASLDFATEPYNAARPYSVALLSVPEAARTEAGKPESSTPTGEPGPMASSPEPAVAKGGFLSFLEANMFSVIIPMCLVLLLLALILPLLFYLRKRNKTGKHDVQVLTAKPRNGLAGDTETFRKVEPGQAIPLTAVPGQGPPPGGQPDPELLQFCRTPNPALKNGQYWV

SEQ ID NO: 250 - DNA, 2457 bp, Homo sapiens
atgggatggagctgtatcatcctcttcttggtagcaacagctacaggtgtacactccgactacaaagacgatgacgacaagtcccgtacgagatctggatcccaattggacggcgggctcgtgctgttctcacacagaggaaccctggatggaggcttccgcttccgcctctctgacggcgagcacacttcccccggacacttcttccgagtgacggcccagaagcaagtgctcctctcgctgaagggcagccagacactgactgtctgcccagggtccgtccagccactcagcagtcagaccctcagggccagctccagcgcaggcactgacccccagctcctgctctaccgtgtggtgcggggcccccagctaggccggctgttccacgcccagcaggacagcacaggggaggccctggtgaacttcactcaggcagaggtctacgctgggaatattctgtatgagcatgagatgccccccgagcccttttgggaggcccatgataccctagagctccagctgtcctcgccgcctgcccgggacgtggccgccacccttgctgtggctgtgtcttttgaggctgcctgtccccagcgccccagccacctctggaagaacaaaggtctctgggtccccgagggccagcgggccaggatcaccgtggctgctctggatgcctccaatctcttggccagcgttccatcaccccagcgctcagagcatgatgtgctcttccaggtcacacagttccccagccgcggccagctgttggtgtccgaggagcccctccatgctgggcagccccacttcctgcagtcccagctggctgcagggcagctagtgtatgcccacggcggtgggggcacccagcaggatggcttccactttcgtgcccacctccaggggccagcaggggcctccgtggctggaccccaaacctcagaggcctttgccatcacggtgagggatgtaaatgagcggccccctcagccacaggcctctgtcccactccggctcacccgaggctctcgtgcccccatctcccgggcccagctgagtgtggtggacccagactcagctcctggggagattgagtacgaggtccagcgggcaccccacaacggcttcctcagcctggtgggtggtggcctggggcccgtgacccgcttcacgcaagccgatgtggattcagggcggctggccttcgtggccaacgggagcagcgtggcaggcatcttccagctgagcatgtctgatggggccagcccacccctgcccatgtccctggctgtggacatcctaccatccgccatcgaggtgcagctgcgggcacccctggaggtgccccaagctttggggcgctcctcactgagccagcagcagctccgggtggtttcagatcgggaggagccagaggcagcataccggttgatccagggaccccagtatgggcatctcctggtgggcgggcggcccacctcggccttcagccaattccagatagaccagggcgaggtggtctttgccttcaccaactcctcctcctctcatgaccacttcagagtcctggcactggctaggggtgtcaatgcatcagccgtagtgaacgtcactgtgagggctctgctgcatgtgtgggcaggtgggccatggccccagggtgccaccctgcgcctggaccccaccgtcctagatgctggcgagctggccaaccgcacagacagtgtgccgcgcttccgcctcctggagggaccccggcatggccgcgtggtccgcgtgccccgagccaggacggagcccgggggcagccagctggtggagcagttcactcagcaggaccttgaggacgggaggctggggctggaggtgggcaggccagaggggagggcccccggccccgcaggtgacagtctcactctggagctgtgggcacagggcgtcccgcctgctgtggcctccctggactttgccactgagccttacaatgctgcccggccctacagcgtggccctgctcagtgtccccgaggccgcccggacggaagcagggaagccagagagcagcacccccacaggcgagccaggccccatggcatccagccctgagcccgctgtggccaagggaggcttcctgagctttctagaggccaacatgttcagcgtcatcatccccatgtgcctggtacttctgctcctggcgctcatcctgcccctgctcttctacctccgaaaacgcaacaagacgggcaagcatgacgtccaggtcctgactgccaagccccgcaacggcctggctggtgacaccgagacctttcgcaaggtggagccaggccaggccatcccgctcacagctgtgcctggccaggggccccctccaggaggccagcctgacccagagctgctgcagttctgccggacacccaaccctgcccttaagaatggccagtactgggtg

SEQ ID NO: 251 - protein, 807 aa, Macaca fascicularis
  misc_feature (714)..(714): Xaa can be any naturally occurring amino acid
PSNGRVVLRAAPGTEVRSFTQAQLDGGLVLFSHRGTLDGGFRFGLSDGEHTSSGHFFRVTAQKQVLLSLEGSRTLTVCPGSVQPLSSQTLRASSSAGTDPQLLLYRVVRGPQLGRLFHAQQDSTGEALVNFTQAEVYAGNILYEHEMPTEPFWEAHDTLELQLSSPPARDVAATLAVAVSFEAACPQRPSHLWKNKGLWVPEGQRAKITMAALDASNLLASVPSSQRLEHDVLFQVTQFPSRGQLLVSEEPLHAGQPHFLQSQLAAGQLVYAHGGGGTQQDGFHFRAHLQGPAGATVAGPQTSEAFAITVRDVNERPPQPQASVPLRITRGSRAPISRAQLSVVDPDSAPGEIEYEVQRAPHNGFLSLVGGGPGPVNRFTQADVDSGRLAFVANGSSVAGVFQLSMSDGASPPLPMSLAVDILPSAIEVQLQAPLEVPQALGRSSLSQQQLRVVSDREEPEAAYRLIQGPKYGHLLVGGQPASAFSQLQIDQGEVVFAFTNFSSSHDHFRVLALARGVNASAVVNITVRALLHVWAGGPWPQGATLRLDPTILDAGELANRTGSVPRFRLLEGPRHGRVVRVPRARMEPGGSQLVEQFTQQDLEDGRLGLEVGRPEGRAPSPTGDSLTLELWAQGVPPAVASLDFATEPYNAARPYSVALLSVPEATRTEAGKPESSTPTGEPGPMASSPVPAVAKGGFLGFLEANMFSVIIPXCLVLLLLALILPLLFYLRKRNKTGKHDVQVLTAKPRNGLAGDTETFRKVEPGQAIPLTAVPGQGPPPGGQPDPELLQFCRTPNPALKNGQYWV

SEQ ID NO: 252 - DNA, 2421 bp, Macaca fascicularis
cccagcaacggacgggtagtgctgcgggcggcgccgggcaccgaggtgcgcagcttcacgcaggcccagctggatggcggactcgtgctgttctcacacagaggaaccctggatggaggcttccgcttcggcctctccgatggcgagcacacttcctctggacacttcttccgagtgacggcccagaagcaagtgctcctctcgctggagggcagccggacactgactgtctgcccagggtccgtgcagccactcagcagtcagaccctcagagccagctccagcgcaggcaccgacccccagctcctgctctaccgtgtggtgcggggcccccagctaggccggctgttccatgcccagcaggacagcacaggggaggccctggtgaacttcactcaggcagaggtctatgctgggaatattctgtatgagcatgagatgcccaccgagcccttctgggaggcccatgataccctagagctccagctgtcctcaccacctgcccgggacgtggctgccacccttgctgtggctgtgtcttttgaggctgcctgtccccagcgccccagccacctctggaagaacaaaggtctctgggtccccgagggccagcgggccaagatcaccatggctgccctggatgcctccaacctcttggccagcgttccatcatcccagcgcctagagcatgatgtgctcttccaggtcacgcagttccccagccggggccagctattggtgtctgaggagcccctccacgctgggcagccccacttcctgcagtcccagctggctgcagggcagctagtgtatgcccacggcggtgggggtacccaacaggatggcttccactttcgtgcccacctccaggggccagcaggggccaccgtggctggaccccaaacctcagaggcttttgccatcacggtgcgggatgtaaatgagcggccccctcagccacaggcctctgtcccactccggatcacccgaggctctcgagcccccatctcccgggcccagctgagtgtcgtggacccagactcagctcctggggagattgagtatgaggtccagcgggcaccccacaacggcttcctcagcctggtgggtggtggcccggggcccgtgaaccgcttcacgcaagccgatgtggattcggggcggctggccttcgtggccaacgggagcagcgtagcaggcgtcttccagctgagcatgtctgatggggccagcccaccgctgcccatgtccctggccgtggacatcctaccatccgccatcgaggtgcagctgcaggcacccctggaggtgccccaagctttggggcgctcctcactgagccagcagcagctccgggtggtttcagatagggaggagccagaggcagcataccgcctcatccagggaccaaagtacgggcatctcctggtgggtgggcagcccgcctcggccttcagccaactccagatagaccagggcgaggtggtctttgccttcaccaacttctcctcctctcatgaccacttcagagtcctggcactggctaggggtgtcaacgcatcagccgtagtgaacatcactgtgagggctctgctgcacgtgtgggcaggtgggccatggccccagggtgctaccctgcgcctggacccaaccatcctagatgctggcgagctggccaaccgcacaggcagtgtgccccgcttccgcctcctggagggaccccggcatggccgcgtggtccgtgtgccccgagccaggatggagcctgggggcagccagctggtggagcagttcactcagcaggaccttgaggatgggaggctggggctggaggtgggcaggccagagggaagggcccccagccccacaggcgacagtctcactctggagctgtgggcacagggcgtcccacctgctgtggcctccctggactttgccactgagccttacaatgctgcccggccctacagcgtggccctgctcagtgtccccgaggccacccggacggaagcagggaagccagagagcagcacccccacaggcgagccaggccccatggcatctagccctgtgcctgctgtggccaagggaggcttcctgggcttccttgaggccaacatgttcagtgtcatcatccccrtgtgcctggtccttctgctcctggcgctcatcttgcccctgctcttctacctccgaaaacgcaacaagacgggcaagcatgacgtccaggtcctgactgccaagccccgcaatggtctggctggtgacactgagacctttcgcaaggtggagccaggccaggccatcccgctcacagctgtgcctggccaggggccccctccgggaggccagcctgacccagagctgctgcagttctgccggacacccaaccctgcccttaagaatggccagtactgggtg

SEQ ID NO: 253 - DNA, 18 bp, Artificial Sequence
  PCR primer for CD3 epsilon chain - forward primer
agagttctgggcctctgc

SEQ ID NO: 254 - DNA, 19 bp, Artificial Sequence
  PCR primer for CD3 epsilon chain - reverse primer
cggatgggctcatagtctg

SEQ ID NO: 255 - protein, 192 aa, Artificial Sequence
  His6-human CD3 epsilon
HHHHHHQDGNEEMGGITQTPYKVSISGTTVILTCPQYPGSEILWQHNDKNIGGDEDDKNIGSDEDHLSLKEFSELEQSGYYVCYPRGSKPEDANFYLYLRARVCENCMEMDVMSVATIVIVDICITGGLLLLVYYWSKNRKAKAKPVTRGAGAGGRQRGQNKERPPPVPNPDYEPIRKGQRDLYSGLNQRRI

SEQ ID NO: 256 - DNA, 633 bp, Artificial Sequence
  His6-human CD3 epsilon
atgggatggagctgtatcatcctcttcttggtagcaacagctacaggtgtacactcccatcatcaccatcatcatcaagatggtaatgaagaaatgggtggtattacacagacaccatataaagtctccatctctggaaccacagtaatattgacatgccctcagtatcctggatctgaaatactatggcaacacaatgataaaaacataggcggtgatgaggatgataaaaacataggcagtgatgaggatcacctgtcactgaaggaattttcagaattggagcaaagtggttattatgtctgctaccccagaggaagcaaaccagaagatgcgaacttttatctctacctgagggcacgcgtgtgtgagaactgcatggagatggatgtgatgtcggtggccacaattgtcatagtggacatctgcatcactgggggcttgctgctgctggtttactactggagcaagaatagaaaggccaaggccaagcctgtgacacgaggagcgggtgctggcggcaggcaaaggggacaaaacaaggagaggccaccacctgttcccaacccagactatgagcccatccggaaaggccagcgggacctgtattctggcctgaatcagagacgcatc

SEQ ID NO: 257 - protein, 505 aa, Artificial Sequence
  CD33 AH3 HL x H2C HL
QVQLVQSGAEVKKPGESVKVSCKASGYTFTNYGMNWVRQAPGQGLEWMGWINTYTGEPTYADDFKGRVTMSSDTSTSTAYLEINSLRSDDTAIYYCARWSWSDGYYVYFDYWGQGTTVTVSSGGGGSGGGGSGGGGSDIVMTQSPDSLTVSLGERTTINCKSSQSVLDSSKNKNSLAWYQQKPGQPPKLLLSWASTRESGIPDRFSGSGSGTDFTLTIDSLQPEDSATYYCQQSAHFPITFGQGTRLEIKSGGGGSEVQLVESGGGLVQPGGSLKLSCAASGFTFNKYAMNWVRQAPGKGLEWVARIRSKYNNYATYYADSVKDRFTISRDDSKNTAYLQMNNLKTEDTAVYYCVRHGNFGNSYISYWAYWGQGTLVTVSSGGGGSGGGGSGGGGSQTVVTQEPSLTVSPGGTVTLTCGSSTGAVTSGYYPNWVQQKPGQAPRGLIGGTKFLAPGTPARFSGSLLGGKAALTLSGVQPEDEAEYYCALWYSNRWVFGGGTKLTVL

SEQ ID NO: 258 - DNA, 1515 bp, Artificial Sequence
  CD33 AH3 HL x H2C HL
caggtgcagctggtgcagtctggagctgaggtgaaaaagcctggagagtcagtcaaggtctcctgcaaggctagcgggtataccttcacaaactatggaatgaactgggtgaggcaggctccaggacagggtttagagtggatgggctggataaacacctacactggagagccaacatatgctgatgacttcaagggacgggttaccatgtcttcggatacctctaccagcactgcctatttggaaatcaacagcctcagaagtgatgacacggctatatattactgtgcgcgctggagttggagtgatggttactacgtttactttgactactggggccaaggcactacggtcaccgtctcctcaggtggtggtggttctggcggcggcggctccggtggtggtggttctgacatcgtgatgacacagtctccagactccctgactgtgtctctgggcgagaggaccaccatcaactgcaagtccagccagagtgttttagacagctccaagaataagaactccttagcttggtaccagcagaaaccaggacagcctcctaaattactcctttcctgggcatctacgcgggaatccgggatccctgaccgattcagtggcagcgggtctgggacagatttcactctcactattgacagcctgcagcctgaagattctgcaacttactattgtcaacagtctgcccacttcccgatcacctttggccaagggacacgactggagattaaatccggaggtggtggctccgaggtgcagctggtcgagtctggaggaggattggtgcagcctggagggtcattgaaactctcatgtgcagcctctggattcaccttcaataagtacgccatgaactgggtccgccaggctccaggaaagggtttggaatgggttgctcgcataagaagtaaatataataattatgcaacatattatgccgattcagtgaaagacaggttcaccatctccagagatgattcaaaaaacactgcctatctacaaatgaacaacttgaaaactgaggacactgccgtgtactactgtgtgagacatgggaacttcggtaatagctacatatcctactgggcttactggggccaagggactctggtcaccgtctcctcaggtggtggtggttctggcggcggcggctccggtggtggtggttctcagactgttgtgactcaggaaccttcactcaccgtatcacctggtggaacagtcacactcacttgtggctcctcgactggggctgttacatctggctactacccaaactgggtccaacaaaaaccaggtcaggcaccccgtggtctaataggtgggactaagttcctcgcccccggtactcctgccagattctcaggctccctgcttggaggcaaggctgccctcaccctctcaggggtacagccagaggatgaggcagaatattactgtgctctatggtacagcaaccgctgggtgttcggtggaggaaccaaactgactgtccta

SEQ ID NO: 259 - protein, 505 aa, Artificial Sequence
  CD33 AH3 HL x F12Q HL
QVQLVQSGAEVKKPGESVKVSCKASGYTFTNYGMNWVRQAPGQGLEWMGWINTYTGEPTYADDFKGRVTMSSDTSTSTAYLEINSLRSDDTAIYYCARWSWSDGYYVYFDYWGQGTTVTVSSGGGGSGGGGSGGGGSDIVMTQSPDSLTVSLGERTTINCKSSQSVLDSSKNKNSLAWYQQKPGQPPKLLLSWASTRESGIPDRFSGSGSGTDFTLTIDSLQPEDSATYYCQQSAHFPITFGQGTRLEIKSGGGGSEVQLVESGGGLVQPGGSLKLSCAASGFTFNSYAMNWVRQAPGKGLEWVARIRSKYNNYATYYADSVKGRFTISRDDSKNTAYLQMNNLKTEDTAVYYCVRHGNFGNSYVSWWAYWGQGTLVTVSSGGGGSGGGGSGGGGSQTVVTQEPSLTVSPGGTVTLTCGSSTGAVTSGNYPNWVQQKPGQAPRGLIGGTKFLAPGTPARFSGSLLGGKAALTLSGVQPEDEAEYYCVLWYSNRWVFGGGTKLTVL

SEQ ID NO: 260 - DNA, 1515 bp, Artificial Sequence
  CD33 AH3 HL x F12Q HL
caggtgcagctggtgcagtctggagctgaggtgaaaaagcctggagagtcagtcaaggtctcctgcaaggctagcgggtataccttcacaaactatggaatgaactgggtgaggcaggctccaggacagggtttagagtggatgggctggataaacacctacactggagagccaacatatgctgatgacttcaagggacgggttaccatgtcttcggatacctctaccagcactgcctatttggaaatcaacagcctcagaagtgatgacacggctatatattactgtgcgcgctggagttggagtgatggttactacgtttactttgactactggggccaaggcactacggtcaccgtctcctcaggtggtggtggttctggcggcggcggctccggtggtggtggttctgacatcgtgatgacacagtctccagactccctgactgtgtctctgggcgagaggaccaccatcaactgcaagtccagccagagtgttttagacagctccaagaataagaactccttagcttggtaccagcagaaaccaggacagcctcctaaattactcctttcctgggcatctacgcgggaatccgggatccctgaccgattcagtggcagcgggtctgggacagatttcactctcactattgacagcctgcagcctgaagattctgcaacttactattgtcaacagtctgcccacttcccgatcacctttggccaagggacacgactggagattaaatccggaggtggtggctccgaggtgcagctggtcgagtctggaggaggattggtgcagcctggagggtcattgaaactctcatgtgcagcctctggattcaccttcaatagctacgccatgaactgggtccgccaggctccaggaaagggtttggaatgggttgctcgcataagaagtaaatataataattatgcaacatattatgccgattcagtgaaaggcaggttcaccatctccagagatgattcaaaaaacactgcctatctacaaatgaacaacttgaaaactgaggacactgccgtgtactactgtgtgagacatgggaacttcggtaatagctacgtttcctggtgggcttactggggccaagggactctggtcaccgtctcctcaggtggtggtggttctggcggcggcggctccggtggtggtggttctcagactgttgtgactcaggaaccttcactcaccgtatcacctggtggaacagtcacactcacttgtggctcctcgactggggctgttacatctggcaactacccaaactgggtccaacaaaaaccaggtcaggcaccccgtggtctaataggtgggactaagttcctcgcccccggtactcctgccagattctcaggctccctgcttggaggcaaggctgccctcaccctctcaggggtacagccagaggatgaggcagaatattactgtgttctatggtacagcaaccgctgggtgttcggtggaggaaccaaactgactgtccta

SEQ ID NO: 261 - protein, 505 aa, Artificial Sequence
  CD33 AH3 HL x I2C HL
QVQLVQSGAEVKKPGESVKVSCKASGYTFTNYGMNWVRQAPGQGLEWMGWINTYTGEPTYADDFKGRVTMSSDTSTSTAYLEINSLRSDDTAIYYCARWSWSDGYYVYFDYWGQGTTVTVSSGGGGSGGGGSGGGGSDIVMTQSPDSLTVSLGERTTINCKSSQSVLDSSKNKNSLAWYQQKPGQPPKLLLSWASTRESGIPDRFSGSGSGTDFTLTIDSLQPEDSATYYCQQSAHFPITFGQGTRLEIKSGGGGSEVQLVESGGGLVQPGGSLKLSCAASGFTFNKYAMNWVRQAPGKGLEWVARIRSKYNNYATYYADSVKDRFTISRDDSKNTAYLQMNNLKTEDTAVYYCVRHGNFGNSYISYWAYWGQGTLVTVSSGGGGSGGGGSGGGGSQTVVTQEPSLTVSPGGTVTLTCGSSTGAVTSGNYPNWVQQKPGQAPRGLIGGTKFLAPGTPARFSGSLLGGKAALTLSGVQPEDEAEYYCVLWYSNRWVFGGGTKLTVL

SEQ ID NO: 262 - DNA, 1515 bp, Artificial Sequence
  CD33 AH3 HL x I2C HL
caggtgcagctggtgcagtctggagctgaggtgaaaaagcctggagagtcagtcaaggtctcctgcaaggctagcgggtataccttcacaaactatggaatgaactgggtgaggcaggctccaggacagggtttagagtggatgggctggataaacacctacactggagagccaacatatgctgatgacttcaagggacgggttaccatgtcttcggatacctctaccagcactgcctatttggaaatcaacagcctcagaagtgatgacacggctatatattactgtgcgcgctggagttggagtgatggttactacgtttactttgactactggggccaaggcactacggtcaccgtctcctcaggtggtggtggttctggcggcggcggctccggtggtggtggttctgacatcgtgatgacacagtctccagactccctgactgtgtctctgggcgagaggaccaccatcaactgcaagtccagccagagtgttttagacagctccaagaataagaactccttagcttggtaccagcagaaaccaggacagcctcctaaattactcctttcctgggcatctacgcgggaatccgggatccctgaccgattcagtggcagcgggtctgggacagatttcactctcactattgacagcctgcagcctgaagattctgcaacttactattgtcaacagtctgcccacttcccgatcacctttggccaagggacacgactggagattaaatccggaggtggtggctccgaggtgcagctggtcgagtctggaggaggattggtgcagcctggagggtcattgaaactctcatgtgcagcctctggattcaccttcaataagtacgccatgaactgggtccgccaggctccaggaaagggtttggaatgggttgctcgcataagaagtaaatataataattatgcaacatattatgccgattcagtgaaagacaggttcaccatctccagagatgattcaaaaaacactgcctatctacaaatgaacaacttgaaaactgaggacactgccgtgtactactgtgtgagacatgggaacttcggtaatagctacatatcctactgggcttactggggccaagggactctggtcaccgtctcctcaggtggtggtggttctggcggcggcggctccggtggtggtggttctcagactgttgtgactcaggaaccttcactcaccgtatcacctggtggaacagtcacactcacttgtggctcctcgactggggctgttacatctggcaactacccaaactgggtccaacaaaaaccaggtcaggcaccccgtggtctaataggtgggactaagttcctcgcccccggtactcctgccagattctcaggctccctgcttggaggcaaggctgccctcaccctctcaggggtacagccagaggatgaggcagaatattactgtgttctatggtacagcaaccgctgggtgttcggtggaggaaccaaactgactgtccta

SEQ ID NO: 263 - protein, 505 aa, Artificial Sequence
  CD33 AF5 HL x H2C HL
QVQLVQSGAEVKKPGASVKVSCKASGYTFTNYGMNWVKQAPGQGLKWMGWINTYTGEPTYADDFKGRVTMTSDTSTSTAYLELHNLRSDDTAVYYCARWSWSDGYYVYFDYWGQGTTVTVSSGGGGSGGGGSGGGGSDIVMTQSPDSLTVSLGERTTINCKSSQSVLDSSKNKNSLAWYQQKPGQPPKLLLSWASTRESGIPDRFSGSGSGTDFTLTIDSLQPEDSATYYCQQSAHFPITFGQGTRLEIKSGGGGSEVQLVESGGGLVQPGGSLKLSCAASGFTFNKYAMNWVRQAPGKGLEWVARIRSKYNNYATYYADSVKDRFTISRDDSKNTAYLQMNNLKTEDTAVYYCVRHGNFGNSYISYWAYWGQGTLVTVSSGGGGSGGGGSGGGGSQTVVTQEPSLTVSPGGTVTLTCGSSTGAVTSGYYPNWVQQKPGQAPRGLIGGTKFLAPGTPARFSGSLLGGKAALTLSGVQPEDEAEYYCALWYSNRWVFGGGTKLTVL

SEQ ID NO: 264 - DNA, 1515 bp, Artificial Sequence
  CD33 AF5 HL x H2C HL
caggtgcagctggtgcagtctggagctgaggtgaagaagcctggagcgtcagtcaaggtctcctgcaaggctagcgggtataccttcacaaactatggaatgaactgggtgaagcaggctccaggacagggtttaaagtggatgggctggataaacacctacactggagagccaacatatgctgatgacttcaagggacgggttaccatgacttcggatacctctaccagcactgcctatttggaactccacaacctcagaagtgatgacacggctgtatattactgtgcgcgctggagttggagtgatggttactacgtttactttgactactggggccaaggcactacggtcaccgtctcctcaggtggtggtggttctggcggcggcggctccggtggtggtggttctgacatcgtgatgacacagtctccagactccctgactgtgtctctgggcgagaggaccaccatcaactgcaagtccagccagagtgttttagacagctccaagaataagaactccttagcttggtaccagcagaaaccaggacagcctcctaaattactcctttcctgggcatctacgcgggaatccgggatccctgaccgattcagtggcagcgggtctgggacagatttcactctcactattgacagcctgcagcctgaagattctgcaacttactattgtcaacagtctgcccacttcccgatcacctttggccaagggacacgactggagattaaatccggaggtggtggctccgaggtgcagctggtcgagtctggaggaggattggtgcagcctggagggtcattgaaactctcatgtgcagcctctggattcaccttcaataagtacgccatgaactgggtccgccaggctccaggaaagggtttggaatgggttgctcgcataagaagtaaatataataattatgcaacatattatgccgattcagtgaaagacaggttcaccatctccagagatgattcaaaaaacactgcctatctacaaatgaacaacttgaaaactgaggacactgccgtgtactactgtgtgagacatgggaacttcggtaatagctacatatcctactgggcttactggggccaagggactctggtcaccgtctcctcaggtggtggtggttctggcggcggcggctccggtggtggtggttctcagactgttgtgactcaggaaccttcactcaccgtatcacctggtggaacagtcacactcacttgtggctcctcgactggggctgttacatctggctactacccaaactgggtccaacaaaaaccaggtcaggcaccccgtggtctaataggtgggactaagttcctcgcccccggtactcctgccagattctcaggctccctgcttggaggcaaggctgccctcaccctctcaggggtacagccagaggatgaggcagaatattactgtgctctatggtacagcaaccgctgggtgttcggtggaggaaccaaactgactgtccta

SEQ ID NO: 265 - protein, 505 aa, Artificial Sequence
  CD33 AF5 HL x F12Q HL
QVQLVQSGAEVKKPGASVKVSCKASGYTFTNYGMNWVKQAPGQGLKWMGWINTYTGEPTYADDFKGRVTMTSDTSTSTAYLELHNLRSDDTAVYYCARWSWSDGYYVYFDYWGQGTTVTVSSGGGGSGGGGSGGGGSDIVMTQSPDSLTVSLGERTTINCKSSQSVLDSSKNKNSLAWYQQKPGQPPKLLLSWASTRESGIPDRFSGSGSGTDFTLTIDSLQPEDSATYYCQQSAHFPITFGQGTRLEIKSGGGGSEVQLVESGGGLVQPGGSLKLSCAASGFTFNSYAMNWVRQAPGKGLEWVARIRSKYNNYATYYADSVKGRFTISRDDSKNTAYLQMNNLKTEDTAVYYCVRHGNFGNSYVSWWAYWGQGTLVTVSSGGGGSGGGGSGGGGSQTVVTQEPSLTVSPGGTVTLTCGSSTGAVTSGNYPNWVQQKPGQAPRGLIGGTKFLAPGTPARFSGSLLGGKAALTLSGVQPEDEAEYYCVLWYSNRWVFGGGTKLTVL

SEQ ID NO: 266 - DNA, 1515 bp, Artificial Sequence
  CD33 AF5 HL x F12Q HL
caggtgcagctggtgcagtctggagctgaggtgaagaagcctggagcgtcagtcaaggtctcctgcaaggctagcgggtataccttcacaaactatggaatgaactgggtgaagcaggctccaggacagggtttaaagtggatgggctggataaacacctacactggagagccaacatatgctgatgacttcaagggacgggttaccatgacttcggatacctctaccagcactgcctatttggaactccacaacctcagaagtgatgacacggctgtatattactgtgcgcgctggagttggagtgatggttactacgtttactttgactactggggccaaggcactacggtcaccgtctcctcaggtggtggtggttctggcggcggcggctccggtggtggtggttctgacatcgtgatgacacagtctccagactccctgactgtgtctctgggcgagaggaccaccatcaactgcaagtccagccagagtgttttagacagctccaagaataagaactccttagcttggtaccagcagaaaccaggacagcctcctaaattactcctttcctgggcatctacgcgggaatccgggatccctgaccgattcagtggcagcgggtctgggacagatttcactctcactattgacagcctgcagcctgaagattctgcaacttactattgtcaacagtctgcccacttcccgatcacctttggccaagggacacgactggagattaaatccggaggtggtggctccgaggtgcagctggtcgagtctggaggaggattggtgcagcctggagggtcattgaaactctcatgtgcagcctctggattcaccttcaatagctacgccatgaactgggtccgccaggctccaggaaagggtttggaatgggttgctcgcataagaagtaaatataataattatgcaacatattatgccgattcagtgaaaggcaggttcaccatctccagagatgattcaaaaaacactgcctatctacaaatgaacaacttgaaaactgaggacactgccgtgtactactgtgtgagacatgggaacttcggtaatagctacgtttcctggtgggcttactggggccaagggactctggtcaccgtctcctcaggtggtggtggttctggcggcggcggctccggtggtggtggttctcagactgttgtgactcaggaaccttcactcaccgtatcacctggtggaacagtcacactcacttgtggctcctcgactggggctgttacatctggcaactacccaaactgggtccaacaaaaaccaggtcaggcaccccgtggtctaataggtgggactaagttcctcgcccccggtactcctgccagattctcaggctccctgcttggaggcaaggctgccctcaccctctcaggggtacagccagaggatgaggcagaatattactgtgttctatggtacagcaaccgctgggtgttcggtggaggaaccaaactgactgtccta

SEQ ID NO: 267 - protein, 505 aa, Artificial Sequence
  CD33 AF5 HL x I2C HL
QVQLVQSGAEVKKPGASVKVSCKASGYTFTNYGMNWVKQAPGQGLKWMGWINTYTGEPTYADDFKGRVTMTSDTSTSTAYLELHNLRSDDTAVYYCARWSWSDGYYVYFDYWGQGTTVTVSSGGGGSGGGGSGGGGSDIVMTQSPDSLTVSLGERTTINCKSSQSVLDSSKNKNSLAWYQQKPGQPPKLLLSWASTRESGIPDRFSGSGSGTDFTLTIDSLQPEDSATYYCQQSAHFPITFGQGTRLEIKSGGGGSEVQLVESGGGLVQPGGSLKLSCAASGFTFNKYAMNWVRQAPGKGLEWVARIRSKYNNYATYYADSVKDRFTISRDDSKNTAYLQMNNLKTEDTAVYYCVRHGNFGNSYISYWAYWGQGTLVTVSSGGGGSGGGGSGGGGSQTVVTQEPSLTVSPGGTVTLTCGSSTGAVTSGNYPNWVQQKPGQAPRGLIGGTKFLAPGTPARFSGSLLGGKAALTLSGVQPEDEAEYYCVLWYSNRWVFGGGTKLTVL

SEQ ID NO: 268 - DNA, 1515 bp, Artificial Sequence
  CD33 AF5 HL x I2C HL
caggtgcagctggtgcagtctggagctgaggtgaagaagcctggagcgtcagtcaaggtctcctgcaaggctagcgggtataccttcacaaactatggaatgaactgggtgaagcaggctccaggacagggtttaaagtggatgggctggataaacacctacactggagagccaacatatgctgatgacttcaagggacgggttaccatgacttcggatacctctaccagcactgcctatttggaactccacaacctcagaagtgatgacacggctgtatattactgtgcgcgctggagttggagtgatggttactacgtttactttgactactggggccaaggcactacggtcaccgtctcctcaggtggtggtggttctggcggcggcggctccggtggtggtggttctgacatcgtgatgacacagtctccagactccctgactgtgtctctgggcgagaggaccaccatcaactgcaagtccagccagagtgttttagacagctccaagaataagaactccttagcttggtaccagcagaaaccaggacagcctcctaaattactcctttcctgggcatctacgcgggaatccgggatccctgaccgattcagtggcagcgggtctgggacagatttcactctcactattgacagcctgcagcctgaagattctgcaacttactattgtcaacagtctgcccacttcccgatcacctttggccaagggacacgactggagattaaatccggaggtggtggctccgaggtgcagctggtcgagtctggaggaggattggtgcagcctggagggtcattgaaactctcatgtgcagcctctggattcaccttcaataagtacgccatgaactgggtccgccaggctccaggaaagggtttggaatgggttgctcgcataagaagtaaatataataattatgcaacatattatgccgattcagtgaaagacaggttcaccatctccagagatgattcaaaaaacactgcctatctacaaatgaacaacttgaaaactgaggacactgccgtgtactactgtgtgagacatgggaacttcggtaatagctacatatcctactgggcttactggggccaagggactctggtcaccgtctcctcaggtggtggtggttctggcggcggcggctccggtggtggtggttctcagactgttgtgactcaggaaccttcactcaccgtatcacctggtggaacagtcacactcacttgtggctcctcgactggggctgttacatctggcaactacccaaactgggtccaacaaaaaccaggtcaggcaccccgtggtctaataggtgggactaagttcctcgcccccggtactcctgccagattctcaggctccctgcttggaggcaaggctgccctcaccctctcaggggtacagccagaggatgaggcagaatattactgtgttctatggtacagcaaccgctgggtgttcggtggaggaaccaaactgactgtccta

SEQ ID NO: 269 - protein, 505 aa, Artificial Sequence
  CD33 AC8 HL x H2C HL
QVQLVQSGAEVKKPGESVKVSCKASGYTFTNYGMNWVKQAPGQGLKWMGWINTYTGEPTYADDFKGRVTMTTDTSTSTAYMEIRNLRNDDTAVYYCARWSWSDGYYVYFDYWGQGTTVTVSSGGGGSGGGGSGGGGSDIVMTQSPDSLTVSLGERTTINCKSSQSVLDSSKNKNSLAWYQQKPGQPPKLLLSWASTRESGIPDRFSGSGSGTDFTLTIDSLQPEDSATYYCQQSAHFPITFGQGTRLEIKSGGGGSEVQLVESGGGLVQPGGSLKLSCAASGFTFNKYAMNWVRQAPGKGLEWVARIRSKYNNYATYYADSVKDRFTISRDDSKNTAYLQMNNLKTEDTAVYYCVRHGNFGNSYISYWAYWGQGTLVTVSSGGGGSGGGGSGGGGSQTVVTQEPSLTVSPGGTVTLTCGSSTGAVTSGYYPNWVQQKPGQAPRGLIGGTKFLAPGTPARFSGSLLGGKAALTLSGVQPEDEAEYYCALWYSNRWVFGGGTKLTVL

SEQ ID NO: 270 - DNA, 1515 bp, Artificial Sequence
  CD33 AC8 HL x H2C HL
caggtgcagctggtgcagtctggagctgaggtgaagaagcctggagagtcagtcaaggtctcctgcaaggctagcgggtataccttcacaaactatggaatgaactgggtgaagcaggctccaggacagggtttaaagtggatgggctggataaacacctacactggagagccaacatatgctgatgacttcaagggacgggttaccatgactacggatacctctaccagcactgcctatatggaaatccgcaacctcagaaatgatgacacggctgtatattactgtgcgcgctggagttggagtgatggttactacgtttactttgactactggggccaaggcactacggtcaccgtctcctcaggtggtggtggttctggcggcggcggctccggtggtggtggttctgacatcgtgatgacacagtctccagactccctgactgtgtctctgggcgagaggaccaccatcaactgcaagtccagccagagtgttttagacagctccaagaataagaactccttagcttggtaccagcagaaaccaggacagcctcctaaattactcctttcctgggcatctacgcgggaatccgggatccctgaccgattcagtggcagcgggtctgggacagatttcactctcactattgacagcctgcagcctgaagattctgcaacttactattgtcaacagtctgcccacttcccgatcacctttggccaagggacacgactggagattaaatccggaggtggtggctccgaggtgcagctggtcgagtctggaggaggattggtgcagcctggagggtcattgaaactctcatgtgcagcctctggattcaccttcaataagtacgccatgaactgggtccgccaggctccaggaaagggtttggaatgggttgctcgcataagaagtaaatataataattatgcaacatattatgccgattcagtgaaagacaggttcaccatctccagagatgattcaaaaaacactgcctatctacaaatgaacaacttgaaaactgaggacactgccgtgtactactgtgtgagacatgggaacttcggtaatagctacatatcctactgggcttactggggccaagggactctggtcaccgtctcctcaggtggtggtggttctggcggcggcggctccggtggtggtggttctcagactgttgtgactcaggaaccttcactcaccgtatcacctggtggaacagtcacactcacttgtggctcctcgactggggctgttacatctggctactacccaaactgggtccaacaaaaaccaggtcaggcaccccgtggtctaataggtgggactaagttcctcgcccccggtactcctgccagattctcaggctccctgcttggaggcaaggctgccctcaccctctcaggggtacagccagaggatgaggcagaatattactgtgctctatggtacagcaaccgctgggtgttcggtggaggaaccaaactgactgtccta

SEQ ID NO: 271 - protein, 505 aa, Artificial Sequence
  CD33 AC8 HL x F12Q HL
QVQLVQSGAEVKKPGESVKVSCKASGYTFTNYGMNWVKQAPGQGLKWMGWINTYTGEPTYADDFKGRVTMTTDTSTSTAYMEIRNLRNDDTAVYYCARWSWSDGYYVYFDYWGQGTTVTVSSGGGGSGGGGSGGGGSDIVMTQSPDSLTVSLGERTTINCKSSQSVLDSSKNKNSLAWYQQKPGQPPKLLLSWASTRESGIPDRFSGSGSGTDFTLTIDSLQPEDSATYYCQQSAHFPITFGQGTRLEIKSGGGGSEVQLVESGGGLVQPGGSLKLSCAASGFTFNSYAMNWVRQAPGKGLEWVARIRSKYNNYATYYADSVKGRFTISRDDSKNTAYLQMNNLKTEDTAVYYCVRHGNFGNSYVSWWAYWGQGTLVTVSSGGGGSGGGGSGGGGSQTVVTQEPSLTVSPGGTVTLTCGSSTGAVTSGNYPNWVQQKPGQAPRGLIGGTKFLAPGTPARFSGSLLGGKAALTLSGVQPEDEAEYYCVLWYSNRWVFGGGTKLTVL

SEQ ID NO: 272 - DNA, 1515 bp, Artificial Sequence
  CD33 AC8 HL x F12Q HL
caggtgcagctggtgcagtctggagctgaggtgaagaagcctggagagtcagtcaaggtctcctgcaaggctagcgggtataccttcacaaactatggaatgaactgggtgaagcaggctccaggacagggtttaaagtggatgggctggataaacacctacactggagagccaacatatgctgatgacttcaagggacgggttaccatgactacggatacctctaccagcactgcctatatggaaatccgcaacctcagaaatgatgacacggctgtatattactgtgcgcgctggagttggagtgatggttactacgtttactttgactactggggccaaggcactacggtcaccgtctcctcaggtggtggtggttctggcggcggcggctccggtggtggtggttctgacatcgtgatgacacagtctccagactccctgactgtgtctctgggcgagaggaccaccatcaactgcaagtccagccagagtgttttagacagctccaagaataagaactccttagcttggtaccagcagaaaccaggacagcctcctaaattactcctttcctgggcatctacgcgggaatccgggatccctgaccgattcagtggcagcgggtctgggacagatttcactctcactattgacagcctgcagcctgaagattctgcaacttactattgtcaacagtctgcccacttcccgatcacctttggccaagggacacgactggagattaaatccggaggtggtggctccgaggtgcagctggtcgagtctggaggaggattggtgcagcctggagggtcattgaaactctcatgtgcagcctctggattcaccttcaatagctacgccatgaactgggtccgccaggctccaggaaagggtttggaatgggttgctcgcataagaagtaaatataataattatgcaacatattatgccgattcagtgaaaggcaggttcaccatctccagagatgattcaaaaaacactgcctatctacaaatgaacaacttgaaaactgaggacactgccgtgtactactgtgtgagacatgggaacttcggtaatagctacgtttcctggtgggcttactggggccaagggactctggtcaccgtctcctcaggtggtggtggttctggcggcggcggctccggtggtggtggttctcagactgttgtgactcaggaaccttcactcaccgtatcacctggtggaacagtcacactcacttgtggctcctcgactggggctgttacatctggcaactacccaaactgggtccaacaaaaaccaggtcaggcaccccgtggtctaataggtgggactaagttcctcgcccccggtactcctgccagattctcaggctccctgcttggaggcaaggctgccctcaccctctcaggggtacagccagaggatgaggcagaatattactgtgttctatggtacagcaaccgctgggtgttcggtggaggaaccaaactgactgtccta

SEQ ID NO: 273 - protein, 505 aa, Artificial Sequence
  CD33 AC8 HL x I2C HL
QVQLVQSGAEVKKPGESVKVSCKASGYTFTNYGMNWVKQAPGQGLKWMGWINTYTGEPTYADDFKGRVTMTTDTSTSTAYMEIRNLRNDDTAVYYCARWSWSDGYYVYFDYWGQGTTVTVSSGGGGSGGGGSGGGGSDIVMTQSPDSLTVSLGERTTINCKSSQSVLDSSKNKNSLAWYQQKPGQPPKLLLSWASTRESGIPDRFSGSGSGTDFTLTIDSLQPEDSATYYCQQSAHFPITFGQGTRLEIKSGGGGSEVQLVESGGGLVQPGGSLKLSCAASGFTFNKYAMNWVRQAPGKGLEWVARIRSKYNNYATYYADSVKDRFTISRDDSKNTAYLQMNNLKTEDTAVYYCVRHGNFGNSYISYWAYWGQGTLVTVSSGGGGSGGGGSGGGGSQTVVTQEPSLTVSPGGTVTLTCGSSTGAVTSGNYPNWVQQKPGQAPRGLIGGTKFLAPGTPARFSGSLLGGKAALTLSGVQPEDEAEYYCVLWYSNRWVFGGGTKLTVL

SEQ ID NO: 274 - DNA, 1515 bp, Artificial Sequence
  CD33 AC8 HL x I2C HL
caggtgcagctggtgcagtctggagctgaggtgaagaagcctggagagtcagtcaaggtctcctgcaaggctagcgggtataccttcacaaactatggaatgaactgggtgaagcaggctccaggacagggtttaaagtggatgggctggataaacacctacactggagagccaacatatgctgatgacttcaagggacgggttaccatgactacggatacctctaccagcactgcctatatggaaatccgcaacctcagaaatgatgacacggctgtatattactgtgcgcgctggagttggagtgatggttactacgtttactttgactactggggccaaggcactacggtcaccgtctcctcaggtggtggtggttctggcggcggcggctccggtggtggtggttctgacatcgtgatgacacagtctccagactccctgactgtgtctctgggcgagaggaccaccatcaactgcaagtccagccagagtgttttagacagctccaagaataagaactccttagcttggtaccagcagaaaccaggacagcctcctaaattactcctttcctgggcatctacgcgggaatccgggatccctgaccgattcagtggcagcgggtctgggacagatttcactctcactattgacagcctgcagcctgaagattctgcaacttactattgtcaacagtctgcccacttcccgatcacctttggccaagggacacgactggagattaaatccggaggtggtggctccgaggtgcagctggtcgagtctggaggaggattggtgcagcctggagggtcattgaaactctcatgtgcagcctctggattcaccttcaataagtacgccatgaactgggtccgccaggctccaggaaagggtttggaatgggttgctcgcataagaagtaaatataataattatgcaacatattatgccgattcagtgaaagacaggttcaccatctccagagatgattcaaaaaacactgcctatctacaaatgaacaacttgaaaactgaggacactgccgtgtactactgtgtgagacatgggaacttcggtaatagctacatatcctactgggcttactggggccaagggactctggtcaccgtctcctcaggtggtggtggttctggcggcggcggctccggtggtggtggttctcagactgttgtgactcaggaaccttcactcaccgtatcacctggtggaacagtcacactcacttgtggctcctcgactggggctgttacatctggcaactacccaaactgggtccaacaaaaaccaggtcaggcaccccgtggtctaataggtgggactaagttcctcgcccccggtactcctgccagattctcaggctccctgcttggaggcaaggctgccctcaccctctcaggggtacagccagaggatgaggcagaatattactgtgttctatggtacagcaaccgctgggtgttcggtggaggaaccaaactgactgtccta

SEQ ID NO: 275 - protein, 505 aa, Artificial Sequence
  CD33 AH11 HL x H2C HL
QVQLVQSGAEVKKPGESVKVSCKASGYTFTNYGMNWVKQAPGQGLKWMGWINTYTGEPTYADDFKGRVTMTSDTSTSTAYMEISSLRSDDTAVYYCARWSWSDGYYVYFDYWGQGTTVTVSSGGGGSGGGGSGGGGSDIVMTQSPDSLTVSLGERTTINCKSSQSVLDSSKNKNSLAWYQQKPGQPPKLLLSWASTRESGIPDRFSGSGSGTDFTLTIDSLQPEDSATYYCQQSAHFPITFGQGTRLEIKSGGGGSEVQLVESGGGLVQPGGSLKLSCAASGFTFNKYAMNWVRQAPGKGLEWVARIRSKYNNYATYYADSVKDRFTISRDDSKNTAYLQMNNLKTEDTAVYYCVRHGNFGNSYISYWAYWGQGTLVTVSSGGGGSGGGGSGGGGSQTVVTQEPSLTVSPGGTVTLTCGSSTGAVTSGYYPNWVQQKPGQAPRGLIGGTKFLAPGTPARFSGSLLGGKAALTLSGVQPEDEAEYYCALWYSNRWVFGGGTKLTVL

SEQ ID NO: 276 - DNA, 1515 bp, Artificial Sequence
  CD33 AH11 HL x H2C HL
caggtgcagctggtgcagtctggagctgaggtgaagaagcctggagagtcagtcaaggtctcctgcaaggctagcgggtataccttcacaaactatggaatgaactgggtgaagcaggctccaggacagggtttaaagtggatgggctggataaacacctacactggagagccaacatatgctgatgacttcaagggacgggttaccatgacttcggatacctctaccagcactgcctatatggaaatcagcagcctcagaagtgatgacacggctgtatattactgtgcgcgctggagttggagtgatggttactacgtttactttgactactggggccaaggcactacggtcaccgtctcctcaggtggtggtggttctggcggcggcggctccggtggtggtggttctgacatcgtgatgacacagtctccagactccctgactgtgtctctgggcgagaggaccaccatcaactgcaagtccagccagagtgttttagacagctccaagaataagaactccttagcttggtaccagcagaaaccaggacagcctcctaaattactcctttcctgggcatctacgcgggaatccgggatccctgaccgattcagtggcagcgggtctgggacagatttcactctcactattgacagcctgcagcctgaagattctgcaacttactattgtcaacagtctgcccacttcccgatcacctttggccaagggacacgactggagattaaatccggaggtggtggctccgaggtgcagctggtcgagtctggaggaggattggtgcagcctggagggtcattgaaactctcatgtgcagcctctggattcaccttcaataagtacgccatgaactgggtccgccaggctccaggaaagggtttggaatgggttgctcgcataagaagtaaatataataattatgcaacatattatgccgattcagtgaaagacaggttcaccatctccagagatgattcaaaaaacactgcctatctacaaatgaacaacttgaaaactgaggacactgccgtgtactactgtgtgagacatgggaacttcggtaatagctacatatcctactgggcttactggggccaagggactctggtcaccgtctcctcaggtggtggtggttctggcggcggcggctccggtggtggtggttctcagactgttgtgactcaggaaccttcactcaccgtatcacctggtggaacagtcacactcacttgtggctcctcgactggggctgttacatctggctactacccaaactgggtccaacaaaaaccaggtcaggcaccccgtggtctaataggtgggactaagttcctcgcccccggtactcctgccagattctcaggctccctgcttggaggcaaggctgccctcaccctctcaggggtacagccagaggatgaggcagaatattactgtgctctatggtacagcaaccgctgggtgttcggtggaggaaccaaactgactgtccta

SEQ ID NO: 277 - protein, 505 aa, Artificial Sequence
  CD33 AH11 HL x F12Q HL
QVQLVQSGAEVKKPGESVKVSCKASGYTFTNYGMNWVKQAPGQGLKWMGWINTYTGEPTYADDFKGRVTMTSDTSTSTAYMEISSLRSDDTAVYYCARWSWSDGYYVYFDYWGQGTTVTVSSGGGGSGGGGSGGGGSDIVMTQSPDSLTVSLGERTTINCKSSQSVLDSSKNKNSLAWYQQKPGQPPKLLLSWASTRESGIPDRFSGSGSGTDFTLTIDSLQPEDSATYYCQQSAHFPITFGQGTRLEIKSGGGGSEVQLVESGGGLVQPGGSLKLSCAASGFTFNSYAMNWVRQAPGKGLEWVARIRSKYNNYATYYADSVKGRFTISRDDSKNTAYLQMNNLKTEDTAVYYCVRHGNFGNSYVSWWAYWGQGTLVTVSSGGGGSGGGGSGGGGSQTVVTQEPSLTVSPGGTVTLTCGSSTGAVTSGNYPNWVQQKPGQAPRGLIGGTKFLAPGTPARFSGSLLGGKAALTLSGVQPEDEAEYYCVLWYSNRWVFGGGTKLTVL

SEQ ID NO: 278 - DNA, 1515 bp, Artificial Sequence
  CD33 AH11 HL x F12Q HL
caggtgcagctggtgcagtctggagctgaggtgaagaagcctggagagtcagtcaaggtctcctgcaaggctagcgggtataccttcacaaactatggaatgaactgggtgaagcaggctccaggacagggtttaaagtggatgggctggataaacacctacactggagagccaacatatgctgatgacttcaagggacgggttaccatgacttcggatacctctaccagcactgcctatatggaaatcagcagcctcagaagtgatgacacggctgtatattactgtgcgcgctggagttggagtgatggttactacgtttactttgactactggggccaaggcactacggtcaccgtctcctcaggtggtggtggttctggcggcggcggctccggtggtggtggttctgacatcgtgatgacacagtctccagactccctgactgtgtctctgggcgagaggaccaccatcaactgcaagtccagccagagtgttttagacagctccaagaataagaactccttagcttggtaccagcagaaaccaggacagcctcctaaattactcctttcctgggcatctacgcgggaatccgggatccctgaccgattcagtggcagcgggtctgggacagatttcactctcactattgacagcctgcagcctgaagattctgcaacttactattgtcaacagtctgcccacttcccgatcacctttggccaagggacacgactggagattaaatccggaggtggtggctccgaggtgcagctggtcgagtctggaggaggattggtgcagcctggagggtcattgaaactctcatgtgcagcctctggattcaccttcaatagctacgccatgaactgggtccgccaggctccaggaaagggtttggaatgggttgctcgcataagaagtaaatataataattatgcaacatattatgccgattcagtgaaaggcaggttcaccatctccagagatgattcaaaaaacactgcctatctacaaatgaacaacttgaaaactgaggacactgccgtgtactactgtgtgagacatgggaacttcggtaatagctacgtttcctggtgggcttactggggccaagggactctggtcaccgtctcctcaggtggtggtggttctggcggcggcggctccggtggtggtggttctcagactgttgtgactcaggaaccttcactcaccgtatcacctggtggaacagtcacactcacttgtggctcctcgactggggctgttacatctggcaactacccaaactgggtccaacaaaaaccaggtcaggcaccccgtggtctaataggtgggactaagttcctcgcccccggtactcctgccagattctcaggctccctgcttggaggcaaggctgccctcaccctctcaggggtacagccagaggatgaggcagaatattactgtgttctatggtacagcaaccgctgggtgttcggtggaggaaccaaactgactgtccta

SEQ ID NO: 279 - protein, 505 aa, Artificial Sequence
  CD33 AH11 HL x I2C HL
QVQLVQSGAEVKKPGESVKVSCKASGYTFTNYGMNWVKQAPGQGLKWMGWINTYTGEPTYADDFKGRVTMTSDTSTSTAYMEISSLRSDDTAVYYCARWSWSDGYYVYFDYWGQGTTVTVSSGGGGSGGGGSGGGGSDIVMTQSPDSLTVSLGERTTINCKSSQSVLDSSKNKNSLAWYQQKPGQPPKLLLSWASTRESGIPDRFSGSGSGTDFTLTIDSLQPEDSATYYCQQSAHFPITFGQGTRLEIKSGGGGSEVQLVESGGGLVQPGGSLKLSCAASGFTFNKYAMNWVRQAPGKGLEWVARIRSKYNNYATYYADSVKDRFTISRDDSKNTAYLQMNNLKTEDTAVYYCVRHGNFGNSYISYWAYWGQGTLVTVSSGGGGSGGGGSGGGGSQTVVTQEPSLTVSPGGTVTLTCGSSTGAVTSGNYPNWVQQKPGQAPRGLIGGTKFLAPGTPARFSGSLLGGKAALTLSGVQPEDEAEYYCVLWYSNRWVFGGGTKLTVL

SEQ ID NO: 280 - DNA, 1515 bp, Artificial Sequence
  CD33 AH11 HL x I2C HL
caggtgcagctggtgcagtctggagctgaggtgaagaagcctggagagtcagtcaaggtctcctgcaaggctagcgggtataccttcacaaactatggaatgaactgggtgaagcaggctccaggacagggtttaaagtggatgggctggataaacacctacactggagagccaacatatgctgatgacttcaagggacgggttaccatgacttcggatacctctaccagcactgcctatatggaaatcagcagcctcagaagtgatgacacggctgtatattactgtgcgcgctggagttggagtgatggttactacgtttactttgactactggggccaaggcactacggtcaccgtctcctcaggtggtggtggttctggcggcggcggctccggtggtggtggttctgacatcgtgatgacacagtctccagactccctgactgtgtctctgggcgagaggaccaccatcaactgcaagtccagccagagtgttttagacagctccaagaataagaactccttagcttggtaccagcagaaaccaggacagcctcctaaattactcctttcctgggcatctacgcgggaatccgggatccctgaccgattcagtggcagcgggtctgggacagatttcactctcactattgacagcctgcagcctgaagattctgcaacttactattgtcaacagtctgcccacttcccgatcacctttggccaagggacacgactggagattaaatccggaggtggtggctccgaggtgcagctggtcgagtctggaggaggattggtgcagcctggagggtcattgaaactctcatgtgcagcctctggattcaccttcaataagtacgccatgaactgggtccgccaggctccaggaaagggtttggaatgggttgctcgcataagaagtaaatataataattatgcaacatattatgccgattcagtgaaagacaggttcaccatctccagagatgattcaaaaaacactgcctatctacaaatgaacaacttgaaaactgaggacactgccgtgtactactgtgtgagacatgggaacttcggtaatagctacatatcctactgggcttactggggccaagggactctggtcaccgtctcctcaggtggtggtggttctggcggcggcggctccggtggtggtggttctcagactgttgtgactcaggaaccttcactcaccgtatcacctggtggaacagtcacactcacttgtggctcctcgactggggctgttacatctggcaactacccaaactgggtccaacaaaaaccaggtcaggcaccccgtggtctaataggtgggactaagttcctcgcccccggtactcctgccagattctcaggctccctgcttggaggcaaggctgccctcaccctctcaggggtacagccagaggatgaggcagaatattactgtgttctatggtacagcaaccgctgggtgttcggtggaggaaccaaactgactgtccta

SEQ ID NO: 281 - protein, 505 aa, Artificial Sequence
  CD33 B3 HL x H2C HL
QVQLVQSGAEVKKPGESVKVSCKASGYTFTNYGMNWVKQAPGQGLEWMGWINTYTGETNYADKFQGRVTFTSDTSTSTAYMELRNLKSDDTAVYYCARWSWSDGYYVYFDYWGQGTTVTVSSGGGGSGGGGSGGGGSDIVMTQSPDSMTVSLGERTTINCKSSQSVLDSSTNKNSLAWYQQKPGQPPKLLLSWASTRESGIPDRFSGSGSGTDFTLTIDSLQPEDSATYYCQQSAHFPITFGQGTRLDIKSGGGGSEVQLVESGGGLVQPGGSLKLSCAASGFTFNKYAMNWVRQAPGKGLEWVARIRSKYNNYATYYADSVKDRFTISRDDSKNTAYLQMNNLKTEDTAVYYCVRHGNFGNSYISYWAYWGQGTLVTVSSGGGGSGGGGSGGGGSQTVVTQEPSLTVSPGGTVTLTCGSSTGAVTSGYYPNWVQQKPGQAPRGLIGGTKFLAPGTPARFSGSLLGGKAALTLSGVQPEDEAEYYCALWYSNRWVFGGGTKLTVL

SEQ ID NO: 282 - DNA, 1515 bp, Artificial Sequence
  CD33 B3 HL x H2C HL
caggtgcagctggtgcagtctggagctgaggtgaagaagcctggagagtcagtcaaggtctcctgcaaggctagcgggtataccttcacaaactatggaatgaactgggtgaagcaggctccaggacagggtttagagtggatgggctggataaacacctacactggagagacaaactatgctgataagttccagggacgcgttaccttcacttcggatacctctaccagcactgcctatatggaactccgcaacctcaaaagtgatgacacggctgtatattactgtgcgcgctggagttggagtgatggttactacgtttactttgactactggggccaaggcactacggtcaccgtctcctcaggtggtggtggttctggcggcggcggctccggtggtggtggttctgacatcgtgatgacacagtctccagactccatgactgtgtctctgggcgagaggaccaccatcaactgcaagtccagccagagtgttttagacagctccacgaataagaactccttagcttggtaccagcagaaaccaggacagcctcctaaattactcctttcctgggcatctacgcgggaatccgggatccctgaccgattcagtggcagcgggtctgggacagatttcactctcactattgacagcctgcagcctgaagattctgcaacttactattgtcaacagtctgcccacttcccgatcacctttggccaagggacacgactggacattaaatccggaggtggtggctccgaggtgcagctggtcgagtctggaggaggattggtgcagcctggagggtcattgaaactctcatgtgcagcctctggattcaccttcaataagtacgccatgaactgggtccgccaggctccaggaaagggtttggaatgggttgctcgcataagaagtaaatataataattatgcaacatattatgccgattcagtgaaagacaggttcaccatctccagagatgattcaaaaaacactgcctatctacaaatgaacaacttgaaaactgaggacactgccgtgtactactgtgtgagacatgggaacttcggtaatagctacatatcctactgggcttactggggccaagggactctggtcaccgtctcctcaggtggtggtggttctggcggcggcggctccggtggtggtggttctcagactgttgtgactcaggaaccttcactcaccgtatcacctggtggaacagtcacactcacttgtggctcctcgactggggctgttacatctggctactacccaaactgggtccaacaaaaaccaggtcaggcaccccgtggtctaataggtgggactaagttcctcgcccccggtactcctgccagattctcaggctccctgcttggaggcaaggctgccctcaccctctcaggggtacagccagaggatgaggcagaatattactgtgctctatggtacagcaaccgctgggtgttcggtggaggaaccaaactgactgtccta

SEQ ID NO: 283 - protein, 505 aa, Artificial Sequence
  CD33 B3 HL x F12Q HL
QVQLVQSGAEVKKPGESVKVSCKASGYTFTNYGMNWVKQAPGQGLEWMGWINTYTGETNYADKFQGRVTFTSDTSTSTAYMELRNLKSDDTAVYYCARWSWSDGYYVYFDYWGQGTTVTVSSGGGGSGGGGSGGGGSDIVMTQSPDSMTVSLGERTTINCKSSQSVLDSSTNKNSLAWYQQKPGQPPKLLLSWASTRESGIPDRFSGSGSGTDFTLTIDSLQPEDSATYYCQQSAHFPITFGQGTRLDIKSGGGGSEVQLVESGGGLVQPGGSLKLSCAASGFTFNSYAMNWVRQAPGKGLEWVARIRSKYNNYATYYADSVKGRFTISRDDSKNTAYLQMNNLKTEDTAVYYCVRHGNFGNSYVSWWAYWGQGTLVTVSSGGGGSGGGGSGGGGSQTVVTQEPSLTVSPGGTVTLTCGSSTGAVTSGNYPNWVQQKPGQAPRGLIGGTKFLAPGTPARFSGSLLGGKAALTLSGVQPEDEAEYYCVLWYSNRWVFGGGTKLTVL

SEQ ID NO: 284 - DNA, 1515 bp, Artificial Sequence
  CD33 B3 HL x F12Q HL
caggtgcagctggtgcagtctggagctgaggtgaagaagcctggagagtcagtcaaggtctcctgcaaggctagcgggtataccttcacaaactatggaatgaactgggtgaagcaggctccaggacagggtttagagtggatgggctggataaacacctacactggagagacaaactatgctgataagttccagggacgcgttaccttcacttcggatacctctaccagcactgcctatatggaactccgcaacctcaaaagtgatgacacggctgtatattactgtgcgcgctggagttggagtgatggttactacgtttactttgactactggggccaaggcactacggtcaccgtctcctcaggtggtggtggttctggcggcggcggctccggtggtggtggttctgacatcgtgatgacacagtctccagactccatgactgtgtctctgggcgagaggaccaccatcaactgcaagtccagccagagtgttttagacagctccacgaataagaactccttagcttggtaccagcagaaaccaggacagcctcctaaattactcctttcctgggcatctacgcgggaatccgggatccctgaccgattcagtggcagcgggtctgggacagatttcactctcactattgacagcctgcagcctgaagattctgcaacttactattgtcaacagtctgcccacttcccgatcacctttggccaagggacacgactggacattaaatccggaggtggtggctccgaggtgcagctggtcgagtctggaggaggattggtgcagcctggagggtcattgaaactctcatgtgcagcctctggattcaccttcaatagctacgccatgaactgggtccgccaggctccaggaaagggtttggaatgggttgctcgcataagaagtaaatataataattatgcaacatattatgccgattcagtgaaaggcaggttcaccatctccagagatgattcaaaaaacactgcctatctacaaatgaacaacttgaaaactgaggacactgccgtgtactactgtgtgagacatgggaacttcggtaatagctacgtttcctggtgggcttactggggccaagggactctggtcaccgtctcctcaggtggtggtggttctggcggcggcggctccggtggtggtggttctcagactgttgtgactcaggaaccttcactcaccgtatcacctggtggaacagtcacactcacttgtggctcctcgactggggctgttacatctggcaactacccaaactgggtccaacaaaaaccaggtcaggcaccccgtggtctaataggtgggactaagttcctcgcccccggtactcctgccagattctcaggctccctgcttggaggcaaggctgccctcaccctctcaggggtacagccagaggatgaggcagaatattactgtgttctatggtacagcaaccgctgggtgttcggtggaggaaccaaactgactgtccta

SEQ ID NO: 285 - protein, 505 aa, Artificial Sequence
  CD33 B3 HL x I2C HL
QVQLVQSGAEVKKPGESVKVSCKASGYTFTNYGMNWVKQAPGQGLEWMGWINTYTGETNYADKFQGRVTFTSDTSTSTAYMELRNLKSDDTAVYYCARWSWSDGYYVYFDYWGQGTTVTVSSGGGGSGGGGSGGGGSDIVMTQSPDSMTVSLGERTTINCKSSQSVLDSSTNKNSLAWYQQKPGQPPKLLLSWASTRESGIPDRFSGSGSGTDFTLTIDSLQPEDSATYYCQQSAHFPITFGQGTRLDIKSGGGGSEVQLVESGGGLVQPGGSLKLSCAASGFTFNKYAMNWVRQAPGKGLEWVARIRSKYNNYATYYADSVKDRFTISRDDSKNTAYLQMNNLKTEDTAVYYCVRHGNFGNSYISYWAYWGQGTLVTVSSGGGGSGGGGSGGGGSQTVVTQEPSLTVSPGGTVTLTCGSSTGAVTSGNYPNWVQQKPGQAPRGLIGGTKFLAPGTPARFSGSLLGGKAALTLSGVQPEDEAEYYCVLWYSNRWVFGGGTKLTVL

SEQ ID NO: 286 - DNA, 1515 bp, Artificial Sequence
  CD33 B3 HL x I2C HL
caggtgcagctggtgcagtctggagctgaggtgaagaagcctggagagtcagtcaaggtctcctgcaaggctagcgggtataccttcacaaactatggaatgaactgggtgaagcaggctccaggacagggtttagagtggatgggctggataaacacctacactggagagacaaactatgctgataagttccagggacgcgttaccttcacttcggatacctctaccagcactgcctatatggaactccgcaacctcaaaagtgatgacacggctgtatattactgtgcgcgctggagttggagtgatggttactacgtttactttgactactggggccaaggcactacggtcaccgtctcctcaggtggtggtggttctggcggcggcggctccggtggtggtggttctgacatcgtgatgacacagtctccagactccatgactgtgtctctgggcgagaggaccaccatcaactgcaagtccagccagagtgttttagacagctccacgaataagaactccttagcttggtaccagcagaaaccaggacagcctcctaaattactcctttcctgggcatctacgcgggaatccgggatccctgaccgattcagtggcagcgggtctgggacagatttcactctcactattgacagcctgcagcctgaagattctgcaacttactattgtcaacagtctgcccacttcccgatcacctttggccaagggacacgactggacattaaatccggaggtggtggctccgaggtgcagctggtcgagtctggaggaggattggtgcagcctggagggtcattgaaactctcatgtgcagcctctggattcaccttcaataagtacgccatgaactgggtccgccaggctccaggaaagggtttggaatgggttgctcgcataagaagtaaatataataattatgcaacatattatgccgattcagtgaaagacaggttcaccatctccagagatgattcaaaaaacactgcctatctacaaatgaacaacttgaaaactgaggacactgccgtgtactactgtgtgagacatgggaacttcggtaatagctacatatcctactgggcttactggggccaagggactctggtcaccgtctcctcaggtggtggtggttctggcggcggcggctccggtggtggtggttctcagactgttgtgactcaggaaccttcactcaccgtatcacctggtggaacagtcacactcacttgtggctcctcgactggggctgttacatctggcaactacccaaactgggtccaacaaaaaccaggtcaggcaccccgtggtctaataggtgggactaagttcctcgcccccggtactcctgccagattctcaggctccctgcttggaggcaaggctgccctcaccctctcaggggtacagccagaggatgaggcagaatattactgtgttctatggtacagcaaccgctgggtgttcggtggaggaaccaaactgactgtccta

SEQ ID NO: 287 - protein, 505 aa, Artificial Sequence
  CD33 F2 HL x H2C HL
QVQLVQSGAEVKKPGESVKVSCKASGYTFTNYGMNWVKQAPGQGLEWMGWINTYTGETNYADKFQGRVTFTSDTSTSTAYMELRNLKSDDTAVYYCARWSWSDGYYVYFDYWGQGTTVTVSSGGGGSGGGGSGGGGSDIVMTQSPDSLSVSLGERTTINCKSSQSVLDSSTNKNSLAWYQQKPGQPPKLLLSWASTRESGIPDRFSGSGSGTDFTLTIDSLQPEDSATYYCQQSAHFPITFGQGTRLEIKSGGGGSEVQLVESGGGLVQPGGSLKLSCAASGFTFNKYAMNWVRQAPGKGLEWVARIRSKYNNYATYYADSVKDRFTISRDDSKNTAYLQMNNLKTEDTAVYYCVRHGNFGNSYISYWAYWGQGTLVTVSSGGGGSGGGGSGGGGSQTVVTQEPSLTVSPGGTVTLTCGSSTGAVTSGYYPNWVQQKPGQAPRGLIGGTKFLAPGTPARFSGSLLGGKAALTLSGVQPEDEAEYYCALWYSNRWVFGGGTKLTVL

SEQ ID NO: 288 - DNA, 1515 bp, Artificial Sequence
  CD33 F2 HL x H2C HL
caggtgcagctggtgcagtctggagctgaggtgaagaagcctggagagtcagtcaaggtctcctgcaaggctagcgggtataccttcacaaactatggaatgaactgggtgaagcaggctccaggacagggtttagagtggatgggctggataaacacctacactggagagacaaactatgctgataagttccagggacgcgttaccttcacttcggatacctctaccagcactgcctatatggaactccgcaacctcaaaagtgatgacacggctgtatattactgtgcgcgctggagttggagtgatggttactacgtttactttgactactggggccaaggcactacggtcaccgtctcctcaggtggtggtggttctggcggcggcggctccggtggtggtggttctgacatcgtgatgacacagtctccagactccctgtctgtgtctctgggcgagaggaccaccatcaactgcaagtccagccagagtgttttagacagctccacgaataagaactccttagcttggtaccagcagaaaccaggacagcctcctaaattactcctttcctgggcatctacgcgggaatccgggatccctgaccgattcagtggcagcgggtctgggacagatttcactctcactattgacagcctgcagcctgaagattctgcaacttactattgtcaacagtctgcccacttcccgatcacctttggccaagggacacgactggagattaaatccggaggtggtggctccgaggtgcagctggtcgagtctggaggaggattggtgcagcctggagggtcattgaaactctcatgtgcagcctctggattcaccttcaataagtacgccatgaactgggtccgccaggctccaggaaagggtttggaatgggttgctcgcataagaagtaaatataataattatgcaacatattatgccgattcagtgaaagacaggttcaccatctccagagatgattcaaaaaacactgcctatctacaaatgaacaacttgaaaactgaggacactgccgtgtactactgtgtgagacatgggaacttcggtaatagctacatatcctactgggcttactggggccaagggactctggtcaccgtctcctcaggtggtggtggttctggcggcggcggctccggtggtggtggttctcagactgttgtgactcaggaaccttcactcaccgtatcacctggtggaacagtcacactcacttgtggctcctcgactggggctgttacatctggctactacccaaactgggtccaacaaaaaccaggtcaggcaccccgtggtctaataggtgggactaagttcctcgcccccggtactcctgccagattctcaggctccctgcttggaggcaaggctgccctcaccctctcaggggtacagccagaggatgaggcagaatattactgtgctctatggtacagcaaccgctgggtgttcggtggaggaaccaaactgactgtccta

SEQ ID NO: 289 - protein, 505 aa, Artificial Sequence
  CD33 F2 HL x F12Q HL
QVQLVQSGAEVKKPGESVKVSCKASGYTFTNYGMNWVKQAPGQGLEWMGWINTYTGETNYADKFQGRVTFTSDTSTSTAYMELRNLKSDDTAVYYCARWSWSDGYYVYFDYWGQGTTVTVSSGGGGSGGGGSGGGGSDIVMTQSPDSLSVSLGERTTINCKSSQSVLDSSTNKNSLAWYQQKPGQPPKLLLSWASTRESGIPDRFSGSGSGTDFTLTIDSLQPEDSATYYCQQSAHFPITFGQGTRLEIKSGGGGSEVQLVESGGGLVQPGGSLKLSCAASGFTFNSYAMNWVRQAPGKGLEWVARIRSKYNNYATYYADSVKGRFTISRDDSKNTAYLQMNNLKTEDTAVYYCVRHGNFGNSYVSWWAYWGQGTLVTVSSGGGGSGGGGSGGGGSQTVVTQEPSLTVSPGGTVTLTCGSSTGAVTSGNYPNWVQQKPGQAPRGLIGGTKFLAPGTPARFSGSLLGGKAALTLSGVQPEDEAEYYCVLWYSNRWVFGGGTKLTVL

SEQ ID NO: 290 - DNA, 1515 bp, Artificial Sequence
  CD33 F2 HL x F12Q HL
caggtgcagctggtgcagtctggagctgaggtgaagaagcctggagagtcagtcaaggtctcctgcaaggctagcgggtataccttcacaaactatggaatgaactgggtgaagcaggctccaggacagggtttagagtggatgggctggataaacacctacactggagagacaaactatgctgataagttccagggacgcgttaccttcacttcggatacctctaccagcactgcctatatggaactccgcaacctcaaaagtgatgacacggctgtatattactgtgcgcgctggagttggagtgatggttactacgtttactttgactactggggccaaggcactacggtcaccgtctcctcaggtggtggtggttctggcggcggcggctccggtggtggtggttctgacatcgtgatgacacagtctccagactccctgtctgtgtctctgggcgagaggaccaccatcaactgcaagtccagccagagtgttttagacagctccacgaataagaactccttagcttggtaccagcagaaaccaggacagcctcctaaattactcctttcctgggcatctacgcgggaatccgggatccctgaccgattcagtggcagcgggtctgggacagatttcactctcactattgacagcctgcagcctgaagattctgcaacttactattgtcaacagtctgcccacttcccgatcacctttggccaagggacacgactggagattaaatccggaggtggtggctccgaggtgcagctggtcgagtctggaggaggattggtgcagcctggagggtcattgaaactctcatgtgcagcctctggattcaccttcaatagctacgccatgaactgggtccgccaggctccaggaaagggtttggaatgggttgctcgcataagaagtaaatataataattatgcaacatattatgccgattcagtgaaaggcaggttcaccatctccagagatgattcaaaaaacactgcctatctacaaatgaacaacttgaaaactgaggacactgccgtgtactactgtgtgagacatgggaacttcggtaatagctacgtttcctggtgggcttactggggccaagggactctggtcaccgtctcctcaggtggtggtggttctggcggcggcggctccggtggtggtggttctcagactgttgtgactcaggaaccttcactcaccgtatcacctggtggaacagtcacactcacttgtggctcctcgactggggctgttacatctggcaactacccaaactgggtccaacaaaaaccaggtcaggcaccccgtggtctaataggtgggactaagttcctcgcccccggtactcctgccagattctcaggctccctgcttggaggcaaggctgccctcaccctctcaggggtacagccagaggatgaggcagaatattactgtgttctatggtacagcaaccgctgggtgttcggtggaggaaccaaactgactgtccta

SEQ ID NO: 291 - protein, 505 aa, Artificial Sequence
  CD33 F2 HL x I2C HL
QVQLVQSGAEVKKPGESVKVSCKASGYTFTNYGMNWVKQAPGQGLEWMGWINTYTGETNYADKFQGRVTFTSDTSTSTAYMELRNLKSDDTAVYYCARWSWSDGYYVYFDYWGQGTTVTVSSGGGGSGGGGSGGGGSDIVMTQSPDSLSVSLGERTTINCKSSQSVLDSSTNKNSLAWYQQKPGQPPKLLLSWASTRESGIPDRFSGSGSGTDFTLTIDSLQPEDSATYYCQQSAHFPITFGQGTRLEIKSGGGGSEVQLVESGGGLVQPGGSLKLSCAASGFTFNKYAMNWVRQAPGKGLEWVARIRSKYNNYATYYADSVKDRFTISRDDSKNTAYLQMNNLKTEDTAVYYCVRHGNFGNSYISYWAYWGQGTLVTVSSGGGGSGGGGSGGGGSQTVVTQEPSLTVSPGGTVTLTCGSSTGAVTSGNYPNWVQQKPGQAPRGLIGGTKFLAPGTPARFSGSLLGGKAALTLSGVQPEDEAEYYCVLWYSNRWVFGGGTKLTVL

SEQ ID NO: 292 - DNA, 1515 bp, Artificial Sequence
  CD33 F2 HL x I2C HL
caggtgcagctggtgcagtctggagctgaggtgaagaagcctggagagtcagtcaaggtctcctgcaaggctagcgggtataccttcacaaactatggaatgaactgggtgaagcaggctccaggacagggtttagagtggatgggctggataaacacctacactggagagacaaactatgctgataagttccagggacgcgttaccttcacttcggatacctctaccagcactgcctatatggaactccgcaacctcaaaagtgatgacacggctgtatattactgtgcgcgctggagttggagtgatggttactacgtttactttgactactggggccaaggcactacggtcaccgtctcctcaggtggtggtggttctggcggcggcggctccggtggtggtggttctgacatcgtgatgacacagtctccagactccctgtctgtgtctctgggcgagaggaccaccatcaactgcaagtccagccagagtgttttagacagctccacgaataagaactccttagcttggtaccagcagaaaccaggacagcctcctaaattactcctttcctgggcatctacgcgggaatccgggatccctgaccgattcagtggcagcgggtctgggacagatttcactctcactattgacagcctgcagcctgaagattctgcaacttactattgtcaacagtctgcccacttcccgatcacctttggccaagggacacgactggagattaaatccggaggtggtggctccgaggtgcagctggtcgagtctggaggaggattggtgcagcctggagggtcattgaaactctcatgtgcagcctctggattcaccttcaataagtacgccatgaactgggtccgccaggctccaggaaagggtttggaatgggttgctcgcataagaagtaaatataataattatgcaacatattatgccgattcagtgaaagacaggttcaccatctccagagatgattcaaaaaacactgcctatctacaaatgaacaacttgaaaactgaggacactgccgtgtactactgtgtgagacatgggaacttcggtaatagctacatatcctactgggcttactggggccaagggactctggtcaccgtctcctcaggtggtggtggttctggcggcggcggctccggtggtggtggttctcagactgttgtgactcaggaaccttcactcaccgtatcacctggtggaacagtcacactcacttgtggctcctcgactggggctgttacatctggcaactacccaaactgggtccaacaaaaaccaggtcaggcaccccgtggtctaataggtgggactaagttcctcgcccccggtactcctgccagattctcaggctccctgcttggaggcaaggctgccctcaccctctcaggggtacagccagaggatgaggcagaatattactgtgttctatggtacagcaaccgctgggtgttcggtggaggaaccaaactgactgtccta

SEQ ID NO: 293 - protein, 505 aa, Artificial Sequence
  CD33 B10 HL x H2C HL
QVQLVQSGAEVKKPGESVKVSCKASGYTFTNYGMNWVKQAPGQGLEWMGWINTYTGEPTYADKFQGRVTMTTDTSTSTAYMEIRNLRSDDTAVYYCARWSWSDGYYVYFDYWGQGTTVTVSSGGGGSGGGGSGGGGSDIVMTQSPDSLTVSLGERTTINCKSSQSVLDSSNNKNSLAWYQQKPGQPPKLLLSWASTRESGIPDRFSGSGSGTDFTLTIDGLQPEDSATYYCQQSAHFPITFGQGTRLEIKSGGGGSEVQLVESGGGLVQPGGSLKLSCAASGFTFNKYAMNWVRQAPGKGLEWVARIRSKYNNYATYYADSVKDRFTISRDDSKNTAYLQMNNLKTEDTAVYYCVRHGNFGNSYISYWAYWGQGTLVTVSSGGGGSGGGGSGGGGSQTVVTQEPSLTVSPGGTVTLTCGSSTGAVTSGYYPNWVQQKPGQAPRGLIGGTKFLAPGTPARFSGSLLGGKAALTLSGVQPEDEAEYYCALWYSNRWVFGGGTKLTVL

SEQ ID NO: 294 - DNA, 1515 bp, Artificial Sequence
  CD33 B10 HL x H2C HL
caggtgcagctggtgcagtctggagctgaggtgaagaagcctggtgagtcagtcaaggtctcctgcaaggctagcgggtataccttcacaaactatggaatgaactgggtgaagcaggctccaggacagggtttagagtggatgggctggataaacacctacactggagagccaacctatgctgataagttccagggacgcgttaccatgactacggatacctctaccagcactgcctatatggaaatccgcaacctcagaagtgatgacacggctgtatattactgtgcgcgctggagttggagtgatggttactacgtttactttgactactggggccaaggcactacggtcaccgtctcctcaggtggtggtggttctggcggcggcggctccggtggtggtggttctgacatcgtgatgacacagtctccagactccctgactgtgtctctgggcgagaggaccaccatcaactgcaagtccagccagagtgttttagacagctccaacaataagaactccttagcttggtaccagcagaaaccaggacagcctcctaaattactcctttcctgggcatctacgcgggaatccgggatccctgaccgattcagtggcagcggttctgggacagatttcactctcactattgacggcctgcagcctgaagattctgcaacttactattgtcaacagtctgcccacttcccgatcacctttggccaagggacacgactggagattaaatccggaggtggtggctccgaggtgcagctggtcgagtctggaggaggattggtgcagcctggagggtcattgaaactctcatgtgcagcctctggattcaccttcaataagtacgccatgaactgggtccgccaggctccaggaaagggtttggaatgggttgctcgcataagaagtaaatataataattatgcaacatattatgccgattcagtgaaagacaggttcaccatctccagagatgattcaaaaaacactgcctatctacaaatgaacaacttgaaaactgaggacactgccgtgtactactgtgtgagacatgggaacttcggtaatagctacatatcctactgggcttactggggccaagggactctggtcaccgtctcctcaggtggtggtggttctggcggcggcggctccggtggtggtggttctcagactgttgtgactcaggaaccttcactcaccgtatcacctggtggaacagtcacactcacttgtggctcctcgactggggctgttacatctggctactacccaaactgggtccaacaaaaaccaggtcaggcaccccgtggtctaataggtgggactaagttcctcgcccccggtactcctgccagattctcaggctccctgcttggaggcaaggctgccctcaccctctcaggggtacagccagaggatgaggcagaatattactgtgctctatggtacagcaaccgctgggtgttcggtggaggaaccaaactgactgtccta

SEQ ID NO: 295 - protein, 505 aa, Artificial Sequence
  CD33 B10 HL x F12Q HL
QVQLVQSGAEVKKPGESVKVSCKASGYTFTNYGMNWVKQAPGQGLEWMGWINTYTGEPTYADKFQGRVTMTTDTSTSTAYMEIRNLRSDDTAVYYCARWSWSDGYYVYFDYWGQGTTVTVSSGGGGSGGGGSGGGGSDIVMTQSPDSLTVSLGERTTINCKSSQSVLDSSNNKNSLAWYQQKPGQPPKLLLSWASTRESGIPDRFSGSGSGTDFTLTIDGLQPEDSATYYCQQSAHFPITFGQGTRLEIKSGGGGSEVQLVESGGGLVQPGGSLKLSCAASGFTFNSYAMNWVRQAPGKGLEWVARIRSKYNNYATYYADSVKGRFTISRDDSKNTAYLQMNNLKTEDTAVYYCVRHGNFGNSYVSWWAYWGQGTLVTVSSGGGGSGGGGSGGGGSQTVVTQEPSLTVSPGGTVTLTCGSSTGAVTSGNYPNWVQQKPGQAPRGLIGGTKFLAPGTPARFSGSLLGGKAALTLSGVQPEDEAEYYCVLWYSNRWVFGGGTKLTVL

SEQ ID NO: 296 - DNA, 1515 bp, Artificial Sequence
  CD33 B10 HL x F12Q HL
caggtgcagctggtgcagtctggagctgaggtgaagaagcctggtgagtcagtcaaggtctcctgcaaggctagcgggtataccttcacaaactatggaatgaactgggtgaagcaggctccaggacagggtttagagtggatgggctggataaacacctacactggagagccaacctatgctgataagttccagggacgcgttaccatgactacggatacctctaccagcactgcctatatggaaatccgcaacctcagaagtgatgacacggctgtatattactgtgcgcgctggagttggagtgatggttactacgtttactttgactactggggccaaggcactacggtcaccgtctcctcaggtggtggtggttctggcggcggcggctccggtggtggtggttctgacatcgtgatgacacagtctccagactccctgactgtgtctctgggcgagaggaccaccatcaactgcaagtccagccagagtgttttagacagctccaacaataagaactccttagcttggtaccagcagaaaccaggacagcctcctaaattactcctttcctgggcatctacgcgggaatccgggatccctgaccgattcagtggcagcggttctgggacagatttcactctcactattgacggcctgcagcctgaagattctgcaacttactattgtcaacagtctgcccacttcccgatcacctttggccaagggacacgactggagattaaatccggaggtggtggctccgaggtgcagctggtcgagtctggaggaggattggtgcagcctggagggtcattgaaactctcatgtgcagcctctggattcaccttcaatagctacgccatgaactgggtccgccaggctccaggaaagggtttggaatgggttgctcgcataagaagtaaatataataattatgcaacatattatgccgattcagtgaaaggcaggttcaccatctccagagatgattcaaaaaacactgcctatctacaaatgaacaacttgaaaactgaggacactgccgtgtactactgtgtgagacatgggaacttcggtaatagctacgtttcctggtgggcttactggggccaagggactctggtcaccgtctcctcaggtggtggtggttctggcggcggcggctccggtggtggtggttctcagactgttgtgactcaggaaccttcactcaccgtatcacctggtggaacagtcacactcacttgtggctcctcgactggggctgttacatctggcaactacccaaactgggtccaacaaaaaccaggtcaggcaccccgtggtctaataggtgggactaagttcctcgcccccggtactcctgccagattctcaggctccctgcttggaggcaaggctgccctcaccctctcaggggtacagccagaggatgaggcagaatattactgtgttctatggtacagcaaccgctgggtgttcggtggaggaaccaaactgactgtccta

SEQ ID NO: 297 - protein, 505 aa, Artificial Sequence
  CD33 B10 HL x I2C HL
QVQLVQSGAEVKKPGESVKVSCKASGYTFTNYGMNWVKQAPGQGLEWMGWINTYTGEPTYADKFQGRVTMTTDTSTSTAYMEIRNLRSDDTAVYYCARWSWSDGYYVYFDYWGQGTTVTVSSGGGGSGGGGSGGGGSDIVMTQSPDSLTVSLGERTTINCKSSQSVLDSSNNKNSLAWYQQKPGQPPKLLLSWASTRESGIPDRFSGSGSGTDFTLTIDGLQPEDSATYYCQQSAHFPITFGQGTRLEIKSGGGGSEVQLVESGGGLVQPGGSLKLSCAASGFTFNKYAMNWVRQAPGKGLEWVARIRSKYNNYATYYADSVKDRFTISRDDSKNTAYLQMNNLKTEDTAVYYCVRHGNFGNSYISYWAYWGQGTLVTVSSGGGGSGGGGSGGGGSQTVVTQEPSLTVSPGGTVTLTCGSSTGAVTSGNYPNWVQQKPGQAPRGLIGGTKFLAPGTPARFSGSLLGGKAALTLSGVQPEDEAEYYCVLWYSNRWVFGGGTKLTVL

SEQ ID NO: 298 - DNA, 1515 bp, Artificial Sequence
  CD33 B10 HL x I2C HL
caggtgcagctggtgcagtctggagctgaggtgaagaagcctggtgagtcagtcaaggtctcctgcaaggctagcgggtataccttcacaaactatggaatgaactgggtgaagcaggctccaggacagggtttagagtggatgggctggataaacacctacactggagagccaacctatgctgataagttccagggacgcgttaccatgactacggatacctctaccagcactgcctatatggaaatccgcaacctcagaagtgatgacacggctgtatattactgtgcgcgctggagttggagtgatggttactacgtttactttgactactggggccaaggcactacggtcaccgtctcctcaggtggtggtggttctggcggcggcggctccggtggtggtggttctgacatcgtgatgacacagtctccagactccctgactgtgtctctgggcgagaggaccaccatcaactgcaagtccagccagagtgttttagacagctccaacaataagaactccttagcttggtaccagcagaaaccaggacagcctcctaaattactcctttcctgggcatctacgcgggaatccgggatccctgaccgattcagtggcagcggttctgggacagatttcactctcactattgacggcctgcagcctgaagattctgcaacttactattgtcaacagtctgcccacttcccgatcacctttggccaagggacacgactggagattaaatccggaggtggtggctccgaggtgcagctggtcgagtctggaggaggattggtgcagcctggagggtcattgaaactctcatgtgcagcctctggattcaccttcaataagtacgccatgaactgggtccgccaggctccaggaaagggtttggaatgggttgctcgcataagaagtaaatataataattatgcaacatattatgccgattcagtgaaagacaggttcaccatctccagagatgattcaaaaaacactgcctatctacaaatgaacaacttgaaaactgaggacactgccgtgtactactgtgtgagacatgggaacttcggtaatagctacatatcctactgggcttactggggccaagggactctggtcaccgtctcctcaggtggtggtggttctggcggcggcggctccggtggtggtggttctcagactgttgtgactcaggaaccttcactcaccgtatcacctggtggaacagtcacactcacttgtggctcctcgactggggctgttacatctggcaactacccaaactgggtccaacaaaaaccaggtcaggcaccccgtggtctaataggtgggactaagttcctcgcccccggtactcctgccagattctcaggctccctgcttggaggcaaggctgccctcaccctctcaggggtacagccagaggatgaggcagaatattactgtgttctatggtacagcaaccgctgggtgttcggtggaggaaccaaactgactgtccta

SEQ ID NO: 299 - protein, 505 aa, Artificial Sequence
  CD33 E11 HL x H2C HL
QVQLVQSGAEVKKPGESVKVSCKASGYTFTNYGMNWVKQAPGQGLEWMGWINTYTGEPTYADKFQGRVTMTTDTSTSTAYMEIRNLGGDDTAVYYCARWSWSDGYYVYFDYWGQGTSVTVSSGGGGSGGGGSGGGGSDIVMTQSPDSLTVSLGERTTINCKSSQSVLDSSTNKNSLAWYQQKPGQPPKLLLSWASTRESGIPDRFSGSGSGTDFTLTIDSPQPEDSATYYCQQSAHFPITFGQGTRLEIKSGGGGSEVQLVESGGGLVQPGGSLKLSCAASGFTFNKYAMNWVRQAPGKGLEWVARIRSKYNNYATYYADSVKDRFTISRDDSKNTAYLQMNNLKTEDTAVYYCVRHGNFGNSYISYWAYWGQGTLVTVSSGGGGSGGGGSGGGGSQTVVTQEPSLTVSPGGTVTLTCGSSTGAVTSGYYPNWVQQKPGQAPRGLIGGTKFLAPGTPARFSGSLLGGKAALTLSGVQPEDEAEYYCALWYSNRWVFGGGTKLTVL

SEQ ID NO: 300 - DNA, 1515 bp, Artificial Sequence
  CD33 E11 HL x H2C HL
caggtgcagctggtgcagtctggagctgaggtgaagaagcctggagagtcagtcaaggtctcctgcaaggctagcgggtataccttcacaaactatggaatgaactgggtgaagcaggctccaggacagggtttagagtggatgggctggataaacacctacactggagagccaacctatgctgataagttccagggacgcgttaccatgactacggatacctctaccagcactgcctatatggaaatccgcaacctcggaggtgatgacacggctgtatattactgtgcgcgctggagttggagtgatggttactacgtttactttgactactggggccaaggcacttcggtcaccgtctcctcaggtggtggtggttctggcggcggcggctccggtggtggtggttctgacatcgtgatgacacagtctccagactccctgactgtgtctctgggcgagaggaccaccatcaactgcaagtccagccagagtgttttagacagctccacgaataagaactccttagcttggtaccagcagaaaccaggacagcctcctaaattactcctttcctgggcatctacgcgggaatccgggatccctgaccgattcagtggcagcgggtctgggacagatttcactctcactattgacagcccgcagcctgaagattctgcaacttactattgtcaacagtctgcccacttcccgatcacctttggccaagggacacgactggagattaaatccggaggtggtggctccgaggtgcagctggtcgagtctggaggaggattggtgcagcctggagggtcattgaaactctcatgtgcagcctctggattcaccttcaataagtacgccatgaactgggtccgccaggctccaggaaagggtttggaatgggttgctcgcataagaagtaaatataataattatgcaacatattatgccgattcagtgaaagacaggttcaccatctccagagatgattcaaaaaacactgcctatctacaaatgaacaacttgaaaactgaggacactgccgtgtactactgtgtgagacatgggaacttcggtaatagctacatatcctactgggcttactggggccaagggactctggtcaccgtctcctcaggtggtggtggttctggcggcggcggctccggtggtggtggttctcagactgttgtgactcaggaaccttcactcaccgtatcacctggtggaacagtcacactcacttgtggctcctcgactggggctgttacatctggctactacccaaactgggtccaacaaaaaccaggtcaggcaccccgtggtctaataggtgggactaagttcctcgcccccggtactcctgccagattctcaggctccctgcttggaggcaaggctgccctcaccctctcaggggtacagccagaggatgaggcagaatattactgtgctctatggtacagcaaccgctgggtgttcggtggaggaaccaaactgactgtccta

SEQ ID NO: 301 - protein, 505 aa, Artificial Sequence
  CD33 E11 HL x F12Q HL
QVQLVQSGAEVKKPGESVKVSCKASGYTFTNYGMNWVKQAPGQGLEWMGWINTYTGEPTYADKFQGRVTMTTDTSTSTAYMEIRNLGGDDTAVYYCARWSWSDGYYVYFDYWGQGTSVTVSSGGGGSGGGGSGGGGSDIVMTQSPDSLTVSLGERTTINCKSSQSVLDSSTNKNSLAWYQQKPGQPPKLLLSWASTRESGIPDRFSGSGSGTDFTLTIDSPQPEDSATYYCQQSAHFPITFGQGTRLEIKSGGGGSEVQLVESGGGLVQPGGSLKLSCAASGFTFNSYAMNWVRQAPGKGLEWVARIRSKYNNYATYYADSVKGRFTISRDDSKNTAYLQMNNLKTEDTAVYYCVRHGNFGNSYVSWWAYWGQGTLVTVSSGGGGSGGGGSGGGGSQTVVTQEPSLTVSPGGTVTLTCGSSTGAVTSGNYPNWVQQKPGQAPRGLIGGTKFLAPGTPARFSGSLLGGKAALTLSGVQPEDEAEYYCVLWYSNRWVFGGGTKLTVL

SEQ ID NO: 302 - DNA, 1515 bp, Artificial Sequence
  CD33 E11 HL x F12Q HL
caggtgcagctggtgcagtctggagctgaggtgaagaagcctggagagtcagtcaaggtctcctgcaaggctagcgggtataccttcacaaactatggaatgaactgggtgaagcaggctccaggacagggtttagagtggatgggctggataaacacctacactggagagccaacctatgctgataagttccagggacgcgttaccatgactacggatacctctaccagcactgcctatatggaaatccgcaacctcggaggtgatgacacggctgtatattactgtgcgcgctggagttggagtgatggttactacgtttactttgactactggggccaaggcacttcggtcaccgtctcctcaggtggtggtggttctggcggcggcggctccggtggtggtggttctgacatcgtgatgacacagtctccagactccctgactgtgtctctgggcgagaggaccaccatcaactgcaagtccagccagagtgttttagacagctccacgaataagaactccttagcttggtaccagcagaaaccaggacagcctcctaaattactcctttcctgggcatctacgcgggaatccgggatccctgaccgattcagtggcagcgggtctgggacagatttcactctcactattgacagcccgcagcctgaagattctgcaacttactattgtcaacagtctgcccacttcccgatcacctttggccaagggacacgactggagattaaatccggaggtggtggctccgaggtgcagctggtcgagtctggaggaggattggtgcagcctggagggtcattgaaactctcatgtgcagcctctggattcaccttcaatagctacgccatgaactgggtccgccaggctccaggaaagggtttggaatgggttgctcgcataagaagtaaatataataattatgcaacatattatgccgattcagtgaaaggcaggttcaccatctccagagatgattcaaaaaacactgcctatctacaaatgaacaacttgaaaactgaggacactgccgtgtactactgtgtgagacatgggaacttcggtaatagctacgtttcctggtgggcttactggggccaagggactctggtcaccgtctcctcaggtggtggtggttctggcggcggcggctccggtggtggtggttctcagactgttgtgactcaggaaccttcactcaccgtatcacctggtggaacagtcacactcacttgtggctcctcgactggggctgttacatctggcaactacccaaactgggtccaacaaaaaccaggtcaggcaccccgtggtctaataggtgggactaagttcctcgcccccggtactcctgccagattctcaggctccctgcttggaggcaaggctgccctcaccctctcaggggtacagccagaggatgaggcagaatattactgtgttctatggtacagcaaccgctgggtgttcggtggaggaaccaaactgactgtccta

SEQ ID NO: 303 - protein, 505 aa, Artificial Sequence
  CD33 E11 HL x I2C HL
QVQLVQSGAEVKKPGESVKVSCKASGYTFTNYGMNWVKQAPGQGLEWMGWINTYTGEPTYADKFQGRVTMTTDTSTSTAYMEIRNLGGDDTAVYYCARWSWSDGYYVYFDYWGQGTSVTVSSGGGGSGGGGSGGGGSDIVMTQSPDSLTVSLGERTTINCKSSQSVLDSSTNKNSLAWYQQKPGQPPKLLLSWASTRESGIPDRFSGSGSGTDFTLTIDSPQPEDSATYYCQQSAHFPITFGQGTRLEIKSGGGGSEVQLVESGGGLVQPGGSLKLSCAASGFTFNKYAMNWVRQAPGKGLEWVARIRSKYNNYATYYADSVKDRFTISRDDSKNTAYLQMNNLKTEDTAVYYCVRHGNFGNSYISYWAYWGQGTLVTVSSGGGGSGGGGSGGGGSQTVVTQEPSLTVSPGGTVTLTCGSSTGAVTSGNYPNWVQQKPGQAPRGLIGGTKFLAPGTPARFSGSLLGGKAALTLSGVQPEDEAEYYCVLWYSNRWVFGGGTKLTVL

SEQ ID NO: 304 - DNA, 1515 bp, Artificial Sequence
  CD33 E11 HL x I2C HL
caggtgcagctggtgcagtctggagctgaggtgaagaagcctggagagtcagtcaaggtctcctgcaaggctagcgggtataccttcacaaactatggaatgaactgggtgaagcaggctccaggacagggtttagagtggatgggctggataaacacctacactggagagccaacctatgctgataagttccagggacgcgttaccatgactacggatacctctaccagcactgcctatatggaaatccgcaacctcggaggtgatgacacggctgtatattactgtgcgcgctggagttggagtgatggttactacgtttactttgactactggggccaaggcacttcggtcaccgtctcctcaggtggtggtggttctggcggcggcggctccggtggtggtggttctgacatcgtgatgacacagtctccagactccctgactgtgtctctgggcgagaggaccaccatcaactgcaagtccagccagagtgttttagacagctccacgaataagaactccttagcttggtaccagcagaaaccaggacagcctcctaaattactcctttcctgggcatctacgcgggaatccgggatccctgaccgattcagtggcagcgggtctgggacagatttcactctcactattgacagcccgcagcctgaagattctgcaacttactattgtcaacagtctgcccacttcccgatcacctttggccaagggacacgactggagattaaatccggaggtggtggctccgaggtgcagctggtcgagtctggaggaggattggtgcagcctggagggtcattgaaactctcatgtgcagcctctggattcaccttcaataagtacgccatgaactgggtccgccaggctccaggaaagggtttggaatgggttgctcgcataagaagtaaatataataattatgcaacatattatgccgattcagtgaaagacaggttcaccatctccagagatgattcaaaaaacactgcctatctacaaatgaacaacttgaaaactgaggacactgccgtgtactactgtgtgagacatgggaacttcggtaatagctacatatcctactgggcttactggggccaagggactctggtcaccgtctcctcaggtggtggtggttctggcggcggcggctccggtggtggtggttctcagactgttgtgactcaggaaccttcactcaccgtatcacctggtggaacagtcacactcacttgtggctcctcgactggggctgttacatctggcaactacccaaactgggtccaacaaaaaccaggtcaggcaccccgtggtctaataggtgggactaagttcctcgcccccggtactcctgccagattctcaggctccctgcttggaggcaaggctgccctcaccctctcaggggtacagccagaggatgaggcagaatattactgtgttctatggtacagcaaccgctgggtgttcggtggaggaaccaaactgactgtccta

SEQ ID NO: 305 - DNA, 1125 bp, Homo sapiens
atgggatggagctgtatcatcctcttcttggtagcaacagctacaggtgtacactccgatccaaatttctggctgcaagtgcaggagtcagtgacggtacaggagggtttgtgcgtcctcgtgccctgcactttcttccatcccataccctactacgacaagaactccccagttcatggttactggttccgggaaggagccattatatccggggactctccagtggccacaaacaagctagatcaagaagtacaggaggagactcagggcagattccgcctccttggggatcccagtaggaacaactgctccctgagcatcgtagacgccaggaggagggataatggttcatacttctttcggatggagagaggaagtaccaaatacagttacaaatctccccagctctctgtgcatgtgacagacttgacccacaggcccaaaatcctcatccctggcactctagaacccggccactccaaaaacctgacctgctctgtgtcctgggcctgtgagcagggaacacccccgatcttctcctggttgtcagctgcccccacctccctgggccccaggactactcactcctcggtgctcataatcaccccacggccccaggaccacggcaccaacctgacctgtcaggtgaagttcgctggagctggtgtgactacggagagaaccatccagctcaacgtcacctatgttccacagaacccaacaactggtatctttccaggagatggctcagggaaacaagagaccagagcaggagtggttcatggggccattggaggagctggtgttacagccctgctcgctctttgtctctgcctcatcttcttcatagtgaagacccacaggaggaaagcagccaggacagcagtgggcaggaatgacacccaccctaccacagggtcagcctccccgaaacaccagaagaagtccaagttacatggccccactgaaacctcaagctgttcaggtgccgcccctactgtggagatggatgaggagctgcattatgcttccctcaactttcatgggatgaatccttccaaggacacctccaccgaatactcagaggtcaggacccagtccgggcatcatcaccatcatcattga

SEQ ID NO: 306 - protein, 374 aa, Homo sapiens
MGWSCIILFLVATATGVHSDPNFWLQVQESVTVQEGLCVLVPCTFFHPIPYYDKNSPVHGYWFREGAIISGDSPVATNKLDQEVQEETQGRFRLLGDPSRNNCSLSIVDARRRDNGSYFFRMERGSTKYSYKSPQLSVHVTDLTHRPKILIPGTLEPGHSKNLTCSVSWACEQGTPPIFSWLSAAPTSLGPRTTHSSVLIITPRPQDHGTNLTCQVKFAGAGVTTERTIQLNVTYVPQNPTTGIFPGDGSGKQETRAGVVHGAIGGAGVTALLALCLCLIFFIVKTHRRKAARTAVGRNDTHPTTGSASPKHQKKSKLHGPTETSSCSGAAPTVEMDEELHYASLNFHGMNPSKDTSTEYSEVRTQSGHHHHHH

SEQ ID NO: 307 - DNA, 1083 bp, Macaca sp.
atgccgctgctgctactgctgcccctgctgtgggcaggggccctggctatggatccaagagtcaggctggaagtgcaggagtcagtgacagtacaggagggtttgtgcgtccttgtgccctgcactttcttccatcccgtaccctaccacaccaggaattccccagttcatggttactggttccgggaaggagccattgtatccttggactctccagtggccacaaacaagctagatcaagaagtacaggaggagacccagggccgattccgcctccttggggatcccagtaggaacaactgctccctgagcatcgtagatgccaggaggagggataacggttcatacttctttcggatggagaaaggaagtaccaaatacagttacaaatctacccagctctctgtgcatgtgacagacttgacccacaggccccaaatcctcatccctggagccctagaccctgaccactccaaaaacctgacctgctctgtgccctgggcctgtgagcagggaacacctccaatcttctcctggatgtcagctgcccccacctccctgggcctcaggaccactcactcctcggtgctcataatcaccccacggccccaggaccacggcaccaacctcacctgtcaggtgaagttccctggagctggcgtgaccacggagagaaccatccagctcaatgtctcctatgcttcacagaacccaagaactgatatctttctaggagacggctcagggaaacaaggagtggttcagggagccatcgggggagctggtgtcacagtcctgctcgctctttgtctctgcctcatcttcttcacagtgaagactcacaggaggaaagcagccaggacagcagtgggcaggatcgacacccaccccgccacagggccaacatcctcgaaacaccagaagaagtccaagttacatggcgccactgaaacctcaggctgttcaggtaccacccttactgtggagatggatgaggagctgcactacgcttccctcaactttcatgggatgaatccttctgaggacacctccaccgaatactcagaggtcaggacccagtga

SEQ ID NO: 308 - protein, 360 aa, Macaca sp.
MPLLLLLPLLWAGALAMDPRVRLEVQESVTVQEGLCVLVPCTFFHPVPYHTRNSPVHGYWFREGAIVSLDSPVATNKLDQEVQEETQGRFRLLGDPSRNNCSLSIVDARRRDNGSYFFRMEKGSTKYSYKSTQLSVHVTDLTHRPQILIPGALDPDHSKNLTCSVPWACEQGTPPIFSWMSAAPTSLGLRTTHSSVLIITPRPQDHGTNLTCQVKFPGAGVTTERTIQLNVSYASQNPRTDIFLGDGSGKQGVVQGAIGGAGVTVLLALCLCLIFFTVKTHRRKAARTAVGRIDTHPATGPTSSKHQKKSKLHGATETSGCSGTTLTVEMDEELHYASLNFHGMNPSEDTSTEYSEVRTQ

SEQ ID NO: 309 - DNA, 843 bp, Artificial Sequence
  1-27 CD3-Fc + Leader
atgggatggagctgtatcatcctcttcttggtagcaacagctacaggtgtacactcccaagatggtaatgaagaaatgggtggtattacacagacaccatataaagtctccatctctggaaccacagtaatattgacatccggagagcccaaatcttgtgacaaaactcacacatgcccaccgtgcccagcacctgaactcctggggggaccgtcagtcttcctcttccccccaaaacccaaggacaccctcatgatctcccggacccctgaggtcacatgcgtggtggtggacgtgagccacgaagaccctgaggtcaagttcaactggtacgtggacggcgtggaggtgcataatgccaagacaaagccgcgggaggagcagtacaacagcacgtaccgtgtggtcagcgtcctcaccgtcctgcaccaggactggctgaatggcaaggagtacaagtgcaaggtctccaacaaagccctcccagcccccatcgagaaaaccatctccaaagccaaagggcagccccgagaaccacaggtgtacaccctgcccccatcccgggaggagatgaccaagaaccaggtcagcctgacctgcctggtcaaaggcttctatcccagcgacatcgccgtggagtgggagagcaatgggcagccggagaacaactacaagaccacgcctcccgtgctggactccgacggctccttcttcctctatagcaagctcaccgtggacaagagcaggtggcagcaggggaacgtcttctcatgctccgtgatgcatgaggctctgcacaaccactacacgcagaagagcctctccctgtccccgggtaaatag

SEQ ID NO: 310 - protein, 280 aa, Artificial Sequence
  1-27 CD3-Fc + Leader
MGWSCIILFLVATATGVHSQDGNEEMGGITQTPYKVSISGTTVILTSGEPKSCDKTHTCPPCPAPELLGGPSVFLFPPKPKDTLMISRTPEVTCVVVDVSHEDPEVKFNWYVDGVEVHNAKTKPREEQYNSTYRVVSVLTVLHQDWLNGKEYKCKVSNKALPAPIEKTISKAKGQPREPQVYTLPPSREEMTKNQVSLTCLVKGFYPSDIAVEWESNGQPENNYKTTPPVLDSDGSFFLYSKLTVDKSRWQQGNVFSCSVMHEALHNHYTQKSLSLSPGK

SEQ ID NO: 311 - protein, 505 aa, Artificial Sequence
  CD33 UD H2C HL x AF5 HL
EVQLVESGGGLVQPGGSLKLSCAASGFTFNKYAMNWVRQAPGKGLEWVARIRSKYNNYATYYADSVKDRFTISRDDSKNTAYLQMNNLKTEDTAVYYCVRHGNFGNSYISYWAYWGQGTLVTVSSGGGGSGGGGSGGGGSQTVVTQEPSLTVSPGGTVTLTCGSSTGAVTSGYYPNWVQQKPGQAPRGLIGGTKFLAPGTPARFSGSLLGGKAALTLSGVQPEDEAEYYCALWYSNRWVFGGGTKLTVLSGGGGSQVQLVQSGAEVKKPGASVKVSCKASGYTFTNYGMNWVKQAPGQGLKWMGWINTYTGEPTYADDFKGRVTMTSDTSTSTAYLELHNLRSDDTAVYYCARWSWSDGYYVYFDYWGQGTTVTVSSGGGGSGGGGSGGGGSDIVMTQSPDSLTVSLGERTTINCKSSQSVLDSSKNKNSLAWYQQKPGQPPKLLLSWASTRESGIPDRFSGSGSGTDFTLTIDSLQPEDSATYYCQQSAHFPITFGQGTRLEIK

SEQ ID NO: 312 - DNA, 1515 bp, Artificial Sequence
  CD33 UD H2C HL x AF5 HL
gaggtgcagctggtcgagtctggaggaggattggtgcagcctggagggtcattgaaactctcatgtgcagcctctggattcaccttcaataagtacgccatgaactgggtccgccaggctccaggaaagggtttggaatgggttgctcgcataagaagtaaatataataattatgcaacatattatgccgattcagtgaaagacaggttcaccatctccagagatgattcaaaaaacactgcctatctacaaatgaacaacttgaaaactgaggacactgccgtgtactactgtgtgagacatgggaacttcggtaatagctacatatcctactgggcttactggggccaagggactctggtcaccgtctcctcaggtggtggtggttctggcggcggcggctccggtggtggtggttctcagactgttgtgactcaggaaccttcactcaccgtatcacctggtggaacagtcacactcacttgtggctcctcgactggggctgttacatctggctactacccaaactgggtccaacaaaaaccaggtcaggcaccccgtggtctaataggtgggactaagttcctcgcccccggtactcctgccagattctcaggctccctgcttggaggcaaggctgccctcaccctctcaggggtacagccagaggatgaggcagaatattactgtgctctatggtacagcaaccgctgggtgttcggtggaggaaccaaactgactgtcctatccggaggtggtggctcccaggtgcagctggtccagtctggagctgaggtgaagaagcctggagcgtcagtcaaggtctcctgcaaggctagcgggtataccttcacaaactatggaatgaactgggtgaagcaggctccaggacagggtttaaagtggatgggctggataaacacctacactggagagccaacatatgctgatgacttcaagggacgggttaccatgacttcggatacctctaccagcactgcctatttggaactccacaacctcagaagtgatgacacggctgtatattactgtgcgcgctggagttggagtgatggttactacgtttactttgactactggggccaaggcactacggtcaccgtctcctcaggtggtggtggttctggcggcggcggctccggtggtggtggttctgacatcgtgatgacacagtctccagactccctgactgtgtctctgggcgagaggaccaccatcaactgcaagtccagccagagtgttttagacagctccaagaataagaactccttagcttggtaccagcagaaaccaggacagcctcctaaattactcctttcctgggcatctacgcgggaatccgggatccctgaccgattcagtggcagcgggtctgggacagatttcactctcactattgacagcctgcagcctgaagattctgcaacttactattgtcaacagtctgcccacttcccgatcacctttggccaagggacacgactggagattaaa

SEQ ID NO: 313 - protein, 505 aa, Artificial Sequence
  CD33 UD F12Q HL x AF5 HL
EVQLVESGGGLVQPGGSLKLSCAASGFTFNSYAMNWVRQAPGKGLEWVARIRSKYNNYATYYADSVKGRFTISRDDSKNTAYLQMNNLKTEDTAVYYCVRHGNFGNSYVSWWAYWGQGTLVTVSSGGGGSGGGGSGGGGSQTVVTQEPSLTVSPGGTVTLTCGSSTGAVTSGNYPNWVQQKPGQAPRGLIGGTKFLAPGTPARFSGSLLGGKAALTLSGVQPEDEAEYYCVLWYSNRWVFGGGTKLTVLSGGGGSQVQLVQSGAEVKKPGASVKVSCKASGYTFTNYGMNWVKQAPGQGLKWMGWINTYTGEPTYADDFKGRVTMTSDTSTSTAYLELHNLRSDDTAVYYCARWSWSDGYYVYFDYWGQGTTVTVSSGGGGSGGGGSGGGGSDIVMTQSPDSLTVSLGERTTINCKSSQSVLDSSKNKNSLAWYQQKPGQPPKLLLSWASTRESGIPDRFSGSGSGTDFTLTIDSLQPEDSATYYCQQSAHFPITFGQGTRLEIK

SEQ ID NO: 314 - DNA, 1515 bp, Artificial Sequence
  CD33 UD F12Q HL x AF5 HL
gaggtgcagctggtcgagtctggaggaggattggtgcagcctggagggtcattgaaactctcatgtgcagcctctggattcaccttcaatagctacgccatgaactgggtccgccaggctccaggaaagggtttggaatgggttgctcgcataagaagtaaatataataattatgcaacatattatgccgattcagtgaaaggcaggttcaccatctccagagatgattcaaaaaacactgcctatctacaaatgaacaacttgaaaactgaggacactgccgtgtactactgtgtgagacatgggaacttcggtaatagctacgtttcctggtgggcttactggggccaagggactctggtcaccgtctcctcaggtggtggtggttctggcggcggcggctccggtggtggtggttctcagactgttgtgactcaggaaccttcactcaccgtatcacctggtggaacagtcacactcacttgtggctcctcgactggggctgttacatctggcaactacccaaactgggtccaacaaaaaccaggtcaggcaccccgtggtctaataggtgggactaagttcctcgcccccggtactcctgccagattctcaggctccctgcttggaggcaaggctgccctcaccctctcaggggtacagccagaggatgaggcagaatattactgtgttctatggtacagcaaccgctgggtgttcggtggaggaaccaaactgactgtcctatccggaggtggtggctcccaggtgcagctggtccagtctggagctgaggtgaagaagcctggagcgtcagtcaaggtctcctgcaaggctagcgggtataccttcacaaactatggaatgaactgggtgaagcaggctccaggacagggtttaaagtggatgggctggataaacacctacactggagagccaacatatgctgatgacttcaagggacgggttaccatgacttcggatacctctaccagcactgcctatttggaactccacaacctcagaagtgatgacacggctgtatattactgtgcgcgctggagttggagtgatggttactacgtttactttgactactggggccaaggcactacggtcaccgtctcctcaggtggtggtggttctggcggcggcggctccggtggtggtggttctgacatcgtgatgacacagtctccagactccctgactgtgtctctgggcgagaggaccaccatcaactgcaagtccagccagagtgttttagacagctccaagaataagaactccttagcttggtaccagcagaaaccaggacagcctcctaaattactcctttcctgggcatctacgcgggaatccgggatccctgaccgattcagtggcagcgggtctgggacagatttcactctcactattgacagcctgcagcctgaagattctgcaacttactattgtcaacagtctgcccacttcccgatcacctttggccaagggacacgactggagattaaa

SEQ ID NO: 315 - protein, 505 aa, Artificial Sequence
  CD33 UD I2C HL x AF5 HL
EVQLVESGGGLVQPGGSLKLSCAASGFTFNKYAMNWVRQAPGKGLEWVARIRSKYNNYATYYADSVKDRFTISRDDSKNTAYLQMNNLKTEDTAVYYCVRHGNFGNSYISYWAYWGQGTLVTVSSGGGGSGGGGSGGGGSQTVVTQEPSLTVSPGGTVTLTCGSSTGAVTSGNYPNWVQQKPGQAPRGLIGGTKFLAPGTPARFSGSLLGGKAALTLSGVQPEDEAEYYCVLWYSNRWVFGGGTKLTVLSGGGGSQVQLVQSGAEVKKPGASVKVSCKASGYTFTNYGMNWVKQAPGQGLKWMGWINTYTGEPTYADDFKGRVTMTSDTSTSTAYLELHNLRSDDTAVYYCARWSWSDGYYVYFDYWGQGTTVTVSSGGGGSGGGGSGGGGSDIVMTQSPDSLTVSLGERTTINCKSSQSVLDSSKNKNSLAWYQQKPGQPPKLLLSWASTRESGIPDRFSGSGSGTDFTLTIDSLQPEDSATYYCQQSAHFPITFGQGTRLEIK

SEQ ID NO: 316 - DNA, 1515 bp, Artificial Sequence
  CD33 UD I2C HL x AF5 HL
gaggtgcagctggtcgagtctggaggaggattggtgcagcctggagggtcattgaaactctcatgtgcagcctctggattcaccttcaataagtacgccatgaactgggtccgccaggctccaggaaagggtttggaatgggttgctcgcataagaagtaaatataataattatgcaacatattatgccgattcagtgaaagacaggttcaccatctccagagatgattcaaaaaacactgcctatctacaaatgaacaacttgaaaactgaggacactgccgtgtactactgtgtgagacatgggaacttcggtaatagctacatatcctactgggcttactggggccaagggactctggtcaccgtctcctcaggtggtggtggttctggcggcggcggctccggtggtggtggttctcagactgttgtgactcaggaaccttcactcaccgtatcacctggtggaacagtcacactcacttgtggctcctcgactggggctgttacatctggcaactacccaaactgggtccaacaaaaaccaggtcaggcaccccgtggtctaataggtgggactaagttcctcgcccccggtactcctgccagattctcaggctccctgcttggaggcaaggctgccctcaccctctcaggggtacagccagaggatgaggcagaatattactgtgttctatggtacagcaaccgctgggtgttcggtggaggaaccaaactgactgtcctatccggaggtggtggctcccaggtgcagctggtccagtctggagctgaggtgaagaagcctggagcgtcagtcaaggtctcctgcaaggctagcgggtataccttcacaaactatggaatgaactgggtgaagcaggctccaggacagggtttaaagtggatgggctggataaacacctacactggagagccaacatatgctgatgacttcaagggacgggttaccatgacttcggatacctctaccagcactgcctatttggaactccacaacctcagaagtgatgacacggctgtatattactgtgcgcgctggagttggagtgatggttactacgtttactttgactactggggccaaggcactacggtcaccgtctcctcaggtggtggtggttctggcggcggcggctccggtggtggtggttctgacatcgtgatgacacagtctccagactccctgactgtgtctctgggcgagaggaccaccatcaactgcaagtccagccagagtgttttagacagctccaagaataagaactccttagcttggtaccagcagaaaccaggacagcctcctaaattactcctttcctgggcatctacgcgggaatccgggatccctgaccgattcagtggcagcgggtctgggacagatttcactctcactattgacagcctgcagcctgaagattctgcaacttactattgtcaacagtctgcccacttcccgatcacctttggccaagggacacgactggagattaaa

SEQ ID NO: 317 - protein, 500 aa, Artificial Sequence
  MCSP-A9 HL x H2C HL
QVQLVQSGAEVKKPGASVKVSCKASGYPFTGYYMHWVRQAPGQGLEWMGWINPNSGGTNYAQKFQGRVTITADESTSTAYMELSRLRSDDTAVYYCAKSWVSWFASWGQGTLVTVSSGGGGSGGGGSGGGGSDIVMTQSPDSLAVSLGERATINCKSSQSVLSSSNNKNYLNWYQQKPGQPPKLLIYWASTRESGVPDRFSGSGSGTDFTLTISSLQAEDVAVYYCQQHFNTPFAFGQGTKLEIKSGGGGSEVQLVESGGGLVQPGGSLKLSCAASGFTFNKYAMNWVRQAPGKGLEWVARIRSKYNNYATYYADSVKDRFTISRDDSKNTAYLQMNNLKTEDTAVYYCVRHGNFGNSYISYWAYWGQGTLVTVSSGGGGSGGGGSGGGGSQTVVTQEPSLTVSPGGTVTLTCGSSTGAVTSGYYPNWVQQKPGQAPRGLIGGTKFLAPGTPARFSGSLLGGKAALTLSGVQPEDEAEYYCALWYSNRWVFGGGTKLTVL

SEQ ID NO: 318 - DNA, 1500 bp, Artificial Sequence
  MCSP-A9 HL x H2C HL
caggtgcagctggtccagtctggggctgaggtgaagaagcctggggcctcagtgaaggtctcctgcaaggcttctggataccccttcaccggctactacatgcactgggtgcgacaggcccctggacaagggcttgagtggatgggatggatcaaccctaacagtggtggcacaaactatgcacagaagtttcagggcagagtcacgattaccgcggacgaatccacgagcacagcctacatggagctgagcaggctgagatctgacgacacggccgtgtattactgtgcgaaatcctgggtctcctggtttgcttcctggggtcaaggaaccttggtcaccgtctcctcaggtggtggtggttctggcggcggcggctccggtggtggtggttctgacatcgtgatgacacagtctccagactccctggctgtgtctctgggcgagagggccaccatcaactgcaagtccagccagagtgtcttatccagctccaacaataagaactacttaaattggtaccagcagaaaccaggacagcctcctaagttgctcatttactgggcatctacccgggaatccggggtccctgaccgattcagtggcagcgggtctgggacagatttcactctcaccatcagcagcctgcaggctgaagatgtggcggtttattactgtcaacaacattttaatactccgttcgcttttggccaggggaccaagctggagatcaaatccggaggtggtggatccgaggtgcagctggtcgagtctggaggaggattggtgcagcctggagggtcattgaaactctcatgtgcagcctctggattcaccttcaataagtacgccatgaactgggtccgccaggctccaggaaagggtttggaatgggttgctcgcataagaagtaaatataataattatgcaacatattatgccgattcagtgaaagacaggttcaccatctccagagatgattcaaaaaacactgcctatctacaaatgaacaacttgaaaactgaggacactgccgtgtactactgtgtgagacatgggaacttcggtaatagctacatatcctactgggcttactggggccaagggactctggtcaccgtctcctcaggtggtggtggttctggcggcggcggctccggtggtggtggttctcagactgttgtgactcaggaaccttcactcaccgtatcacctggtggaacagtcacactcacttgtggctcctcgactggggctgttacatctggctactacccaaactgggtccaacaaaaaccaggtcaggcaccccgtggtctaataggtgggactaagttcctcgcccccggtactcctgccagattctcaggctccctgcttggaggcaaggctgccctcaccctctcaggggtacagccagaggatgaggcagaatattactgtgctctatggtacagcaaccgctgggtgttcggtggaggaaccaaactgactgtccta

SEQ ID NO: 319 - protein, 500 aa, Artificial Sequence
  MCSP-A9 HL x F12Q HL
QVQLVQSGAEVKKPGASVKVSCKASGYPFTGYYMHWVRQAPGQGLEWMGWINPNSGGTNYAQKFQGRVTITADESTSTAYMELSRLRSDDTAVYYCAKSWVSWFASWGQGTLVTVSSGGGGSGGGGSGGGGSDIVMTQSPDSLAVSLGERATINCKSSQSVLSSSNNKNYLNWYQQKPGQPPKLLIYWASTRESGVPDRFSGSGSGTDFTLTISSLQAEDVAVYYCQQHFNTPFAFGQGTKLEIKSGGGGSEVQLVESGGGLVQPGGSLKLSCAASGFTFNSYAMNWVRQAPGKGLEWVARIRSKYNNYATYYADSVKGRFTISRDDSKNTAYLQMNNLKTEDTAVYYCVRHGNFGNSYVSWWAYWGQGTLVTVSSGGGGSGGGGSGGGGSQTVVTQEPSLTVSPGGTVTLTCGSSTGAVTSGNYPNWVQQKPGQAPRGLIGGTKFLAPGTPARFSGSLLGGKAALTLSGVQPEDEAEYYCVLWYSNRWVFGGGTKLTVL

SEQ ID NO: 320 - DNA, 1500 bp, Artificial Sequence
  MCSP-A9 HL x F12Q HL
caggtgcagctggtccagtctggggctgaggtgaagaagcctggggcctcagtgaaggtctcctgcaaggcttctggataccccttcaccggctactacatgcactgggtgcgacaggcccctggacaagggcttgagtggatgggatggatcaaccctaacagtggtggcacaaactatgcacagaagtttcagggcagagtcacgattaccgcggacgaatccacgagcacagcctacatggagctgagcaggctgagatctgacgacacggccgtgtattactgtgcgaaatcctgggtctcctggtttgcttcctggggtcaaggaaccttggtcaccgtctcctcaggtggtggtggttctggcggcggcggctccggtggtggtggttctgacatcgtgatgacacagtctccagactccctggctgtgtctctgggcgagagggccaccatcaactgcaagtccagccagagtgtcttatccagctccaacaataagaactacttaaattggtaccagcagaaaccaggacagcctcctaagttgctcatttactgggcatctacccgggaatccggggtccctgaccgattcagtggcagcgggtctgggacagatttcactctcaccatcagcagcctgcaggctgaagatgtggcggtttattactgtcaacaacattttaatactccgttcgcttttggccaggggaccaagctggagatcaaatccggaggtggtggatccgaggtgcagctggtcgagtctggaggaggattggtgcagcctggagggtcattgaaactctcatgtgcagcctctggattcaccttcaatagctacgccatgaactgggtccgccaggctccaggaaagggtttggaatgggttgctcgcataagaagtaaatataataattatgcaacatattatgccgattcagtgaaaggcaggttcaccatctccagagatgattcaaaaaacactgcctatctacaaatgaacaacttgaaaactgaggacactgccgtgtactactgtgtgagacatgggaacttcggtaatagctacgtttcctggtgggcttactggggccaagggactctggtcaccgtctcctcaggtggtggtggttctggcggcggcggctccggtggtggtggttctcagactgttgtgactcaggaaccttcactcaccgtatcacctggtggaacagtcacactcacttgtggctcctcgactggggctgttacatctggcaactacccaaactgggtccaacaaaaaccaggtcaggcaccccgtggtctaataggtgggactaagttcctcgcccccggtactcctgccagattctcaggctccctgcttggaggcaaggctgccctcaccctctcaggggtacagccagaggatgaggcagaatattactgtgttctatggtacagcaaccgctgggtgttcggtggaggaaccaaactgactgtccta

SEQ ID NO: 321 - protein, 500 aa, Artificial Sequence
  MCSP-A9 HL x I2C HL
QVQLVQSGAEVKKPGASVKVSCKASGYPFTGYYMHWVRQAPGQGLEWMGWINPNSGGTNYAQKFQGRVTITADESTSTAYMELSRLRSDDTAVYYCAKSWVSWFASWGQGTLVTVSSGGGGSGGGGSGGGGSDIVMTQSPDSLAVSLGERATINCKSSQSVLSSSNNKNYLNWYQQKPGQPPKLLIYWASTRESGVPDRFSGSGSGTDFTLTISSLQAEDVAVYYCQQHFNTPFAFGQGTKLEIKSGGGGSEVQLVESGGGLVQPGGSLKLSCAASGFTFNKYAMNWVRQAPGKGLEWVARIRSKYNNYATYYADSVKDRFTISRDDSKNTAYLQMNNLKTEDTAVYYCVRHGNFGNSYISYWAYWGQGTLVTVSSGGGGSGGGGSGGGGSQTVVTQEPSLTVSPGGTVTLTCGSSTGAVTSGNYPNWVQQKPGQAPRGLIGGTKFLAPGTPARFSGSLLGGKAALTLSGVQPEDEAEYYCVLWYSNRWVFGGGTKLTVL

SEQ ID NO: 322 - DNA, 1500 bp, Artificial Sequence
  MCSP-A9 HL x I2C HL
caggtgcagctggtccagtctggggctgaggtgaagaagcctggggcctcagtgaaggtctcctgcaaggcttctggataccccttcaccggctactacatgcactgggtgcgacaggcccctggacaagggcttgagtggatgggatggatcaaccctaacagtggtggcacaaactatgcacagaagtttcagggcagagtcacgattaccgcggacgaatccacgagcacagcctacatggagctgagcaggctgagatctgacgacacggccgtgtattactgtgcgaaatcctgggtctcctggtttgcttcctggggtcaaggaaccttggtcaccgtctcctcaggtggtggtggttctggcggcggcggctccggtggtggtggttctgacatcgtgatgacacagtctccagactccctggctgtgtctctgggcgagagggccaccatcaactgcaagtccagccagagtgtcttatccagctccaacaataagaactacttaaattggtaccagcagaaaccaggacagcctcctaagttgctcatttactgggcatctacccgggaatccggggtccctgaccgattcagtggcagcgggtctgggacagatttcactctcaccatcagcagcctgcaggctgaagatgtggcggtttattactgtcaacaacattttaatactccgttcgcttttggccaggggaccaagctggagatcaaatccggaggtggtggatccgaggtgcagctggtcgagtctggaggaggattggtgcagcctggagggtcattgaaactctcatgtgcagcctctggattcaccttcaataagtacgccatgaactgggtccgccaggctccaggaaagggtttggaatgggttgctcgcataagaagtaaatataataattatgcaacatattatgccgattcagtgaaagacaggttcaccatctccagagatgattcaaaaaacactgcctatctacaaatgaacaacttgaaaactgaggacactgccgtgtactactgtgtgagacatgggaacttcggtaatagctacatatcctactgggcttactggggccaagggactctggtcaccgtctcctcaggtggtggtggttctggcggcggcggctccggtggtggtggttctcagactgttgtgactcaggaaccttcactcaccgtatcacctggtggaacagtcacactcacttgtggctcctcgactggggctgttacatctggcaactacccaaactgggtccaacaaaaaccaggtcaggcaccccgtggtctaataggtgggactaagttcctcgcccccggtactcctgccagattctcaggctccctgcttggaggcaaggctgccctcaccctctcaggggtacagccagaggatgaggcagaatattactgtgttctatggtacagcaaccgctgggtgttcggtggaggaaccaaactgactgtccta

SEQ ID NO: 323 - protein, 500 aa, Artificial Sequence
  MCSP-C8 HL x I2C HL
QVQLVQSGAEVKRPGASMKVSCKASGYTFTNYYIHWVRQAPGQGLEWMGWINPNSGATNYAQKFQGRVTMTRDTSTSTVYMELSSLRSEDTAVYYCAKSWVSWFASWGQGTLVTVSSGGGGSGGGGSGGGGSDIVMTQSPDSLAVSLGERATINCKSSQSVLNSKNNRNYLAWYQQKPGQPPKLLIYWASTRESGVPDRFSGSGSGTDFTLTISGLQAEDVAVYYCQQHYSTPFTFGPGTKVDIKSGGGGSEVQLVESGGGLVQPGGSLKLSCAASGFTFNKYAMNWVRQAPGKGLEWVARIRSKYNNYATYYADSVKDRFTISRDDSKNTAYLQMNNLKTEDTAVYYCVRHGNFGNSYISYWAYWGQGTLVTVSSGGGGSGGGGSGGGGSQTVVTQEPSLTVSPGGTVTLTCGSSTGAVTSGNYPNWVQQKPGQAPRGLIGGTKFLAPGTPARFSGSLLGGKAALTLSGVQPEDEAEYYCVLWYSNRWVFGGGTKLTVL

SEQ ID NO: 324 - DNA, 1500 bp, Artificial Sequence
  MCSP-C8 HL x I2C HL
caggtgcagctggtccagtctggggctgaggtgaagaggcctggggcctcaatgaaggtctcctgcaaggcttctgggtacaccttcaccaactactatatacactgggtgcgacaggcccctggacaaggtcttgagtggatgggttggatcaaccctaacagtggtgccacaaactatgcacagaagttccagggcagagtcaccatgaccagggacacgtccacgagcacagtctacatggagctgagcagcctgagatctgaggacacggccgtgtattactgtgcgaaatcctgggtctcctggtttgcttcctggggtcaaggaaccttggtcaccgtctcctcaggtggtggtggttctggcggcggcggctccggtggtggtggttctgacatcgtgatgacccagtctccagactccctggctgtgtctctgggcgagagggccaccatcaactgcaagtccagccagagtgttttaaacagcaagaacaataggaactacttagcttggtaccagcagaaaccaggacagcctcctaagctgctcatttactgggcatctacccgggaatccggggtccctgaccgattcagtggcagcgggtctgggacagatttcactctcaccatcagtggcctgcaggctgaagatgtggcagtttattactgtcagcaacattatagtactccattcacttttggccctgggaccaaagtggatatcaaatccggaggtggtggatccgaggtgcagctggtcgagtctggaggaggattggtgcagcctggagggtcattgaaactctcatgtgcagcctctggattcaccttcaataagtacgccatgaactgggtccgccaggctccaggaaagggtttggaatgggttgctcgcataagaagtaaatataataattatgcaacatattatgccgattcagtgaaagacaggttcaccatctccagagatgattcaaaaaacactgcctatctacaaatgaacaacttgaaaactgaggacactgccgtgtactactgtgtgagacatgggaacttcggtaatagctacatatcctactgggcttactggggccaagggactctggtcaccgtctcctcaggtggtggtggttctggcggcggcggctccggtggtggtggttctcagactgttgtgactcaggaaccttcactcaccgtatcacctggtggaacagtcacactcacttgtggctcctcgactggggctgttacatctggcaactacccaaactgggtccaacaaaaaccaggtcaggcaccccgtggtctaataggtgggactaagttcctcgcccccggtactcctgccagattctcaggctccctgcttggaggcaaggctgccctcaccctctcaggggtacagccagaggatgaggcagaatattactgtgttctatggtacagcaaccgctgggtgttcggtggaggaaccaaactgactgtccta

SEQ ID NO: 325 - protein, 500 aa, Artificial Sequence
  MCSP-B8 HL x I2C HL
QVQLVQSGAEVKRPGASMKVSCKASGYTFTNYYIHWVRQAPGQGLEWMGWINPNSGATNYAQKFQGRVTMTRDTSTSTVYMELSSLRSEDTAVYYCAKSWVSWFASWGQGTLVTVSSGGGGSGGGGSGGGGSDIVMTQSPDSLTVSPGERATINCKSSQSVLNSKNNRNYLAWYQQKPGQPPKLLIYWASTRESGVPDRFSGSGSGTDFTLTIDSLQPEDSATYYCQQHYSTPFTFGQGTRLEIKSGGGGSEVQLVESGGGLVQPGGSLKLSCAASGFTFNKYAMNWVRQAPGKGLEWVARIRSKYNNYATYYADSVKDRFTISRDDSKNTAYLQMNNLKTEDTAVYYCVRHGNFGNSYISYWAYWGQGTLVTVSSGGGGSGGGGSGGGGSQTVVTQEPSLTVSPGGTVTLTCGSSTGAVTSGNYPNWVQQKPGQAPRGLIGGTKFLAPGTPARFSGSLLGGKAALTLSGVQPEDEAEYYCVLWYSNRWVFGGGTKLTVL

SEQ ID NO: 326 - DNA, 1500 bp, Artificial Sequence
  MCSP-B8 HL x I2C HL
caggtgcagctggtccagtctggggctgaggtgaagaggcctggggcctcaatgaaggtctcctgcaaggcttctgggtacaccttcaccaactactatatacactgggtgcgacaggcccctggacaaggtcttgagtggatgggttggatcaaccctaacagtggtgccacaaactatgcacagaagttccagggcagagtcaccatgaccagggacacgtccacgagcacagtctacatggagctgagcagcctgagatctgaggacacggccgtgtattactgtgcgaaatcctgggtctcctggtttgcttcctggggtcaaggaaccttggtcaccgtctcctcaggtggtggtggttctggcggcggcggctccggtggtggtggttctgacatcgtgatgacccagtctccagactccctgactgtgtctccgggcgagagggccaccatcaactgcaagtccagccagagtgttttaaacagcaagaacaataggaactacttagcttggtaccagcagaaaccaggacagcctcctaagctgctcatttactgggcatctacccgggaatccggggtccctgaccgattcagtggcagcgggtctgggacagatttcactctcaccatcgattccctgcagcctgaagatagtgcaacttattactgtcagcaacattatagtactccattcacttttggccaggggaccagactggagatcaaatccggaggtggtggatccgaggtgcagctggtcgagtctggaggaggattggtgcagcctggagggtcattgaaactctcatgtgcagcctctggattcaccttcaataagtacgccatgaactgggtccgccaggctccaggaaagggtttggaatgggttgctcgcataagaagtaaatataataattatgcaacatattatgccgattcagtgaaagacaggttcaccatctccagagatgattcaaaaaacactgcctatctacaaatgaacaacttgaaaactgaggacactgccgtgtactactgtgtgagacatgggaacttcggtaatagctacatatcctactgggcttactggggccaagggactctggtcaccgtctcctcaggtggtggtggttctggcggcggcggctccggtggtggtggttctcagactgttgtgactcaggaaccttcactcaccgtatcacctggtggaacagtcacactcacttgtggctcctcgactggggctgttacatctggcaactacccaaactgggtccaacaaaaaccaggtcaggcaccccgtggtctaataggtgggactaagttcctcgcccccggtactcctgccagattctcaggctccctgcttggaggcaaggctgccctcaccctctcaggggtacagccagaggatgaggcagaatattactgtgttctatggtacagcaaccgctgggtgttcggtggaggaaccaaactgactgtccta

SEQ ID NO: 327 - protein, 500 aa, Artificial Sequence
  MCSP-B7 HL x I2C HL
QVQLVQSGAEVKRPGASMKVSCKASGYTFTNYYIHWVRQAPGQGLEWMGWINPNSGATNYAQKFQGRVTMTRDTSTSTVYMELSSLRSEDTAVYYCAKSWVSWFASWGQGTLVTVSSGGGGSGGGGSGGGGSDIVMTQSPDSLTVSLGERTTINCKSSQSVLNSKNNRNYLAWYQQKPGQPPKLLIYWASTRESGVPDRFSGSGSGTDFTLTIDSLQPEDIATYYCQQHYSTPFTFGQGTRLEIKSGGGGSEVQLVESGGGLVQPGGSLKLSCAASGFTFNKYAMNWVRQAPGKGLEWVARIRSKYNNYATYYADSVKDRFTISRDDSKNTAYLQMNNLKTEDTAVYYCVRHGNFGNSYISYWAYWGQGTLVTVSSGGGGSGGGGSGGGGSQTVVTQEPSLTVSPGGTVTLTCGSSTGAVTSGNYPNWVQQKPGQAPRGLIGGTKFLAPGTPARFSGSLLGGKAALTLSGVQPEDEAEYYCVLWYSNRWVFGGGTKLTVL

SEQ ID NO: 328 - DNA, 1500 bp, Artificial Sequence
  MCSP-B7 HL x I2C HL
caggtgcagctggtccagtctggggctgaggtgaagaggcctggggcctcaatgaaggtctcctgcaaggcttctgggtacaccttcaccaactactatatacactgggtgcgacaggcccctggacaaggtcttgagtggatgggttggatcaaccctaacagtggtgccacaaactatgcacagaagttccagggcagagtcaccatgaccagggacacgtccacgagcacagtctacatggagctgagcagcctgagatctgaggacacggccgtgtattactgtgcgaaatcctgggtctcctggtttgcttcctggggtcaaggaaccttggtcaccgtctcctcaggtggtggtggttctggcggcggcggctccggtggtggtggttctgacatcgtgatgacccagtctccagactccctgactgtgtctctgggcgagaggaccaccatcaactgcaagtccagccagagtgttttaaacagcaagaacaataggaactacttagcttggtaccagcagaaaccaggacagcctcctaagctgctcatttactgggcatctacccgggaatccggggtccctgaccgattcagtggcagcgggtctgggacagatttcactctcaccatcgattccctgcagcctgaagatattgcaacttattactgtcagcaacattatagtactccattcacttttggccaggggaccagactggagatcaaatccggaggtggtggatccgaggtgcagctggtcgagtctggaggaggattggtgcagcctggagggtcattgaaactctcatgtgcagcctctggattcaccttcaataagtacgccatgaactgggtccgccaggctccaggaaagggtttggaatgggttgctcgcataagaagtaaatataataattatgcaacatattatgccgattcagtgaaagacaggttcaccatctccagagatgattcaaaaaacactgcctatctacaaatgaacaacttgaaaactgaggacactgccgtgtactactgtgtgagacatgggaacttcggtaatagctacatatcctactgggcttactggggccaagggactctggtcaccgtctcctcaggtggtggtggttctggcggcggcggctccggtggtggtggttctcagactgttgtgactcaggaaccttcactcaccgtatcacctggtggaacagtcacactcacttgtggctcctcgactggggctgttacatctggcaactacccaaactgggtccaacaaaaaccaggtcaggcaccccgtggtctaataggtgggactaagttcctcgcccccggtactcctgccagattctcaggctccctgcttggaggcaaggctgccctcaccctctcaggggtacagccagaggatgaggcagaatattactgtgttctatggtacagcaaccgctgggtgttcggtggaggaaccaaactgactgtccta

SEQ ID NO: 329 - protein, 500 aa, Artificial Sequence
  MCSP-G8 HL x I2C HL
QVQLVQSGAEVKRPGASMKVSCKASGYTFTNYYIHWVRQAPGQGLEWMGWINPNSGATNYAQKFQGRVTMTRDTSTSTVYMELSSLRSEDTAVYYCAKSWVSWFASWGQGTLVTVSSGGGGSGGGGSGGGGSDIVMTQSPDSLTVSLGERATINCKSSQSVLNSKNNRNYLAWYQQKPGQPPKLLIYWASTRESGVPDRFSGSGSGTDFTLTIDSLQPEDSATYYCQQHYSTPFTFGQGTRLEIKSGGGGSEVQLVESGGGLVQPGGSLKLSCAASGFTFNKYAMNWVRQAPGKGLEWVARIRSKYNNYATYYADSVKDRFTISRDDSKNTAYLQMNNLKTEDTAVYYCVRHGNFGNSYISYWAYWGQGTLVTVSSGGGGSGGGGSGGGGSQTVVTQEPSLTVSPGGTVTLTCGSSTGAVTSGNYPNWVQQKPGQAPRGLIGGTKFLAPGTPARFSGSLLGGKAALTLSGVQPEDEAEYYCVLWYSNRWVFGGGTKLTVL

SEQ ID NO: 330 - DNA, 1500 bp, Artificial Sequence
  MCSP-G8 HL x I2C HL
caggtgcagctggtccagtctggggctgaggtgaagaggcctggggcctcaatgaaggtctcctgcaaggcttctgggtacaccttcaccaactactatatacactgggtgcgacaggcccctggacaaggtcttgagtggatgggttggatcaaccctaacagtggtgccacaaactatgcacagaagttccagggcagagtcaccatgaccagggacacgtccacgagcacagtctacatggagctgagcagcctgagatctgaggacacggccgtgtattactgtgcgaaatcctgggtctcctggtttgcttcctggggtcaaggaaccttggtcaccgtctcctcaggtggtggtggttctggcggcggcggctccggtggtggtggttctgacatcgtgatgacccagtctccagactccctgactgtgtctctgggcgagagggccaccatcaactgcaagtccagccagagtgttttaaacagcaagaacaataggaactacttagcttggtaccagcagaaaccaggacagcctcctaagctgctcatttactgggcatctacccgggaatccggggtccctgaccgattcagtggcagcgggtctgggacagatttcactctcaccatcgattccctgcagcctgaagatagtgcaacttattactgtcagcaacattatagtactccattcacttttggccaggggaccagactggagatcaaatccggaggtggtggatccgaggtgcagctggtcgagtctggaggaggattggtgcagcctggagggtcattgaaactctcatgtgcagcctctggattcaccttcaataagtacgccatgaactgggtccgccaggctccaggaaagggtttggaatgggttgctcgcataagaagtaaatataataattatgcaacatattatgccgattcagtgaaagacaggttcaccatctccagagatgattcaaaaaacactgcctatctacaaatgaacaacttgaaaactgaggacactgccgtgtactactgtgtgagacatgggaacttcggtaatagctacatatcctactgggcttactggggccaagggactctggtcaccgtctcctcaggtggtggtggttctggcggcggcggctccggtggtggtggttctcagactgttgtgactcaggaaccttcactcaccgtatcacctggtggaacagtcacactcacttgtggctcctcgactggggctgttacatctggcaactacccaaactgggtccaacaaaaaccaggtcaggcaccccgtggtctaataggtgggactaagttcctcgcccccggtactcctgccagattctcaggctccctgcttggaggcaaggctgccctcaccctctcaggggtacagccagaggatgaggcagaatattactgtgttctatggtacagcaaccgctgggtgttcggtggaggaaccaaactgactgtccta

SEQ ID NO: 331 - protein, 500 aa, Artificial Sequence
  MCSP-D5 HL x I2C HL
QVQLVQSGAEVKRPGASMKVSCKASGYTFTNYYIHWVRQAPGQGLEWMGWINPNSGATNYAQKFQGRVTMTRDTSTSTVYMELSSLRSEDTAVYYCAKSWVSWFASWGQGTLVTVSSGGGGSGGGGSGGGGSDIVMTQSPDSLAVSLGERATINCKSSQSVLNSKNNRNYLAWYQQKPGQPPKLLIYWASTRESGVPDRFSGSGSGTDFTLTIDSLQAEDSATYYCQQHYSTPFTFGQGTRLEIKSGGGGSEVQLVESGGGLVQPGGSLKLSCAASGFTFNKYAMNWVRQAPGKGLEWVARIRSKYNNYATYYADSVKDRFTISRDDSKNTAYLQMNNLKTEDTAVYYCVRHGNFGNSYISYWAYWGQGTLVTVSSGGGGSGGGGSGGGGSQTVVTQEPSLTVSPGGTVTLTCGSSTGAVTSGNYPNWVQQKPGQAPRGLIGGTKFLAPGTPARFSGSLLGGKAALTLSGVQPEDEAEYYCVLWYSNRWVFGGGTKLTVL

SEQ ID NO: 332 - DNA, 1500 bp, Artificial Sequence
  MCSP-D5 HL x I2C HL
caggtgcagctggtccagtctggggctgaggtgaagaggcctggggcctcaatgaaggtctcctgcaaggcttctgggtacaccttcaccaactactatatacactgggtgcgacaggcccctggacaaggtcttgagtggatgggttggatcaaccctaacagtggtgccacaaactatgcacagaagttccagggcagagtcaccatgaccagggacacgtccacgagcacagtctacatggagctgagcagcctgagatctgaggacacggccgtgtattactgtgcgaaatcctgggtctcctggtttgcttcctggggtcaaggaaccttggtcaccgtctcctcaggtggtggtggttctggcggcggcggctccggtggtggtggttctgacatcgtgatgacccagtctccagactccctggctgtgtctctgggcgagagggccaccatcaactgcaagtccagccagagtgttttaaacagcaagaacaataggaactacttagcttggtaccagcagaaaccaggacagcctcctaagctgctcatttactgggcatctacccgggaatccggggtccctgaccgattcagtggcagcgggtctgggacagatttcactctcaccatcgattccctgcaggctgaagatagtgcaacttattactgtcagcaacattatagtactccattcacttttggccaggggaccagactggagatcaaatccggaggtggtggatccgaggtgcagctggtcgagtctggaggaggattggtgcagcctggagggtcattgaaactctcatgtgcagcctctggattcaccttcaataagtacgccatgaactgggtccgccaggctccaggaaagggtttggaatgggttgctcgcataagaagtaaatataataattatgcaacatattatgccgattcagtgaaagacaggttcaccatctccagagatgattcaaaaaacactgcctatctacaaatgaacaacttgaaaactgaggacactgccgtgtactactgtgtgagacatgggaacttcggtaatagctacatatcctactgggcttactggggccaagggactctggtcaccgtctcctcaggtggtggtggttctggcggcggcggctccggtggtggtggttctcagactgttgtgactcaggaaccttcactcaccgtatcacctggtggaacagtcacactcacttgtggctcctcgactggggctgttacatctggcaactacccaaactgggtccaacaaaaaccaggtcaggcaccccgtggtctaataggtgggactaagttcctcgcccccggtactcctgccagattctcaggctccctgcttggaggcaaggctgccctcaccctctcaggggtacagccagaggatgaggcagaatattactgtgttctatggtacagcaaccgctgggtgttcggtggaggaaccaaactgactgtccta

SEQ ID NO: 333 - protein, 500 aa, Artificial Sequence
  MCSP-F7 HL x I2C HL
QVQLVQSGAEVKRPGASMKVSCKASGYTFTNYYIHWVRQAPGQGLEWMGWINPNSGATNYAQKFQGRVTMTRDTSTSTVYMELSSLRSEDTAVYYCAKSWVSWFASWGQGTLVTVSSGGGGSGGGGSGGGGSDIVMTQSPDSLAVSLGERATINCKSSQSVLNSKNNRNYLAWYQQKPGQPPKLLIYWASTRESGVPDRFSGSGSGTDFTLTIDVLQPEDIATYYCQQHYSTPFTFGQGTRLEIKSGGGGSEVQLVESGGGLVQPGGSLKLSCAASGFTFNKYAMNWVRQAPGKGLEWVARIRSKYNNYATYYADSVKDRFTISRDDSKNTAYLQMNNLKTEDTAVYYCVRHGNFGNSYISYWAYWGQGTLVTVSSGGGGSGGGGSGGGGSQTVVTQEPSLTVSPGGTVTLTCGSSTGAVTSGNYPNWVQQKPGQAPRGLIGGTKFLAPGTPARFSGSLLGGKAALTLSGVQPEDEAEYYCVLWYSNRWVFGGGTKLTVL

SEQ ID NO: 334 - DNA, 1500 bp, Artificial Sequence
  MCSP-F7 HL x I2C HL
caggtgcagctggtccagtctggggctgaggtgaagaggcctggggcctcaatgaaggtctcctgcaaggcttctgggtacaccttcaccaactactatatacactgggtgcgacaggcccctggacaaggtcttgagtggatgggttggatcaaccctaacagtggtgccacaaactatgcacagaagttccagggcagagtcaccatgaccagggacacgtccacgagcacagtctacatggagctgagcagcctgagatctgaggacacggccgtgtattactgtgcgaaatcctgggtctcctggtttgcttcctggggtcaaggaaccttggtcaccgtctcctcaggtggtggtggttctggcggcggcggctccggtggtggtggttctgacatcgtgatgacccagtctccagactccctggctgtgtctctgggcgagagggccaccatcaactgcaagtccagccagagtgttttaaacagcaagaacaataggaactacttagcttggtaccagcagaaaccaggacagcctcctaagctgctcatttactgggcatctacccgggaatccggggtccctgaccgattcagtggcagcgggtctgggacagatttcactctcaccatcgatgtcctgcagcctgaagatattgcaacttattactgtcagcaacattatagtactccattcacttttggccaggggaccagactggagatcaaatccggaggtggtggatccgaggtgcagctggtcgagtctggaggaggattggtgcagcctggagggtcattgaaactctcatgtgcagcctctggattcaccttcaataagtacgccatgaactgggtccgccaggctccaggaaagggtttggaatgggttgctcgcataagaagtaaatataataattatgcaacatattatgccgattcagtgaaagacaggttcaccatctccagagatgattcaaaaaacactgcctatctacaaatgaacaacttgaaaactgaggacactgccgtgtactactgtgtgagacatgggaacttcggtaatagctacatatcctactgggcttactggggccaagggactctggtcaccgtctcctcaggtggtggtggttctggcggcggcggctccggtggtggtggttctcagactgttgtgactcaggaaccttcactcaccgtatcacctggtggaacagtcacactcacttgtggctcctcgactggggctgttacatctggcaactacccaaactgggtccaacaaaaaccaggtcaggcaccccgtggtctaataggtgggactaagttcctcgcccccggtactcctgccagattctcaggctccctgcttggaggcaaggctgccctcaccctctcaggggtacagccagaggatgaggcagaatattactgtgttctatggtacagcaaccgctgggtgttcggtggaggaaccaaactgactgtccta

SEQ ID NO: 335 - protein, 500 aa, Artificial Sequence
  MCSP-G5 HL x I2C HL
QVQLVQSGAEVKRPGASMKVSCKASGYTFTNYYIHWVRQAPGQGLEWMGWINPNSGATNYAQKFQGRVTMTRDTSTSTVYMELSSLRSEDTAVYYCAKSWVSWFASWGQGTLVTVSSGGGGSGGGGSGGGGSDIVMTQSPDSLAVSLGDRATINCKSSQSVLNSKNNRNYLAWYQQKPGQPPKLLIYWASTRESGVPDRFSGSGSGTDFTLTIDSLQPEDSATYYCQQHYSTPFTFGQGTRLEIKSGGGGSEVQLVESGGGLVQPGGSLKLSCAASGFTFNKYAMNWVRQAPGKGLEWVARIRSKYNNYATYYADSVKDRFTISRDDSKNTAYLQMNNLKTEDTAVYYCVRHGNFGNSYISYWAYWGQGTLVTVSSGGGGSGGGGSGGGGSQTVVTQEPSLTVSPGGTVTLTCGSSTGAVTSGNYPNWVQQKPGQAPRGLIGGTKFLAPGTPARFSGSLLGGKAALTLSGVQPEDEAEYYCVLWYSNRWVFGGGTKLTVL

SEQ ID NO: 336 - DNA, 1500 bp, Artificial Sequence
  MCSP-G5 HL x I2C HL
caggtgcagctggtccagtctggggctgaggtgaagaggcctggggcctcaatgaaggtctcctgcaaggcttctgggtacaccttcaccaactactatatacactgggtgcgacaggcccctggacaaggtcttgagtggatgggttggatcaaccctaacagtggtgccacaaactatgcacagaagttccagggcagagtcaccatgaccagggacacgtccacgagcacagtctacatggagctgagcagcctgagatctgaggacacggccgtgtattactgtgcgaaatcctgggtctcctggtttgcttcctggggtcaaggaaccttggtcaccgtctcctcaggtggtggtggttctggcggcggcggctccggtggtggtggttctgacatcgtgatgacccagtctccagactccctggctgtgtctctgggcgacagggccaccatcaactgcaagtccagccagagtgttttaaacagcaagaacaataggaactacttagcttggtaccagcagaaaccaggacagcctcctaagctgctcatttactgggcatctacccgggaatccggggtccctgaccgattcagtggcagcgggtctgggacagatttcactctcaccatcgattccctgcagcctgaggatagtgcaacttattactgtcagcaacattatagtactccattcacttttggccaggggaccagactggagatcaaatccggaggtggtggatccgaggtgcagctggtcgagtctggaggaggattggtgcagcctggagggtcattgaaactctcatgtgcagcctctggattcaccttcaataagtacgccatgaactgggtccgccaggctccaggaaagggtttggaatgggttgctcgcataagaagtaaatataataattatgcaacatattatgccgattcagtgaaagacaggttcaccatctccagagatgattcaaaaaacactgcctatctacaaatgaacaacttgaaaactgaggacactgccgtgtactactgtgtgagacatgggaacttcggtaatagctacatatcctactgggcttactggggccaagggactctggtcaccgtctcctcaggtggtggtggttctggcggcggcggctccggtggtggtggttctcagactgttgtgactcaggaaccttcactcaccgtatcacctggtggaacagtcacactcacttgtggctcctcgactggggctgttacatctggcaactacccaaactgggtccaacaaaaaccaggtcaggcaccccgtggtctaataggtgggactaagttcctcgcccccggtactcctgccagattctcaggctccctgcttggaggcaaggctgccctcaccctctcaggggtacagccagaggatgaggcagaatattactgtgttctatggtacagcaaccgctgggtgttcggtggaggaaccaaactgactgtccta

SEQ ID NO: 337 - protein, 500 aa, Artificial Sequence
  MCSP-F8 HL x I2C HL
QVQLVQSGAEVKRPGASMKVSCKASGYTFTNYYIHWVRQAPGQGLEWMGWINPNSGATNYAQKFQGRVTMTRDTSTSTVYMELSSLRSEDTAVYYCAKSWVSWFASWGQGTLVTVSSGGGGSGGGGSGGGGSDIVMTQSPDSLTVSLGERATINCKSSQSVLNSKNNRNYLAWYQQKPGQPPKLLIYWASTRESGVPDRFSGSGSGTDFTLTIDSLQAEDSAIYYCQQHYSTPFTFGQGTRLEIKSGGGGSEVQLVESGGGLVQPGGSLKLSCAASGFTFNKYAMNWVRQAPGKGLEWVARIRSKYNNYATYYADSVKDRFTISRDDSKNTAYLQMNNLKTEDTAVYYCVRHGNFGNSYISYWAYWGQGTLVTVSSGGGGSGGGGSGGGGSQTVVTQEPSLTVSPGGTVTLTCGSSTGAVTSGNYPNWVQQKPGQAPRGLIGGTKFLAPGTPARFSGSLLGGKAALTLSGVQPEDEAEYYCVLWYSNRWVFGGGTKLTVL

SEQ ID NO: 338 - DNA, 1500 bp, Artificial Sequence
  MCSP-F8 HL x I2C HL
caggtgcagctggtccagtctggggctgaggtgaagaggcctggggcctcaatgaaggtctcctgcaaggcttctgggtacaccttcaccaactactatatacactgggtgcgacaggcccctggacaaggtcttgagtggatgggttggatcaaccctaacagtggtgccacaaactatgcacagaagttccagggcagagtcaccatgaccagggacacgtccacgagcacagtctacatggagctgagcagcctgagatctgaggacacggccgtgtattactgtgcgaaatcctgggtctcctggtttgcttcctggggtcaaggaaccttggtcaccgtctcctcaggtggtggtggttctggcggcggcggctccggtggtggtggttctgacatcgtgatgacccagtctccagactccctgactgtgtctctgggcgagagggccaccatcaactgcaagtccagccagagtgttttaaacagcaagaacaataggaactacttagcttggtaccagcagaaaccaggacagcctcctaagctgctcatttactgggcatctacccgggaatccggggtccctgaccgattcagtggcagcgggtctgggacagatttcactctcaccatcgattccctgcaggctgaagatagtgcaatttattactgtcagcaacattatagtactccattcacttttggccaggggaccagactggagatcaaatccggaggtggtggatccgaggtgcagctggtcgagtctggaggaggattggtgcagcctggagggtcattgaaactctcatgtgcagcctctggattcaccttcaataagtacgccatgaactgggtccgccaggctccaggaaagggtttggaatgggttgctcgcataagaagtaaatataataattatgcaacatattatgccgattcagtgaaagacaggttcaccatctccagagatgattcaaaaaacactgcctatctacaaatgaacaacttgaaaactgaggacactgccgtgtactactgtgtgagacatgggaacttcggtaatagctacatatcctactgggcttactggggccaagggactctggtcaccgtctcctcaggtggtggtggttctggcggcggcggctccggtggtggtggttctcagactgttgtgactcaggaaccttcactcaccgtatcacctggtggaacagtcacactcacttgtggctcctcgactggggctgttacatctggcaactacccaaactgggtccaacaaaaaccaggtcaggcaccccgtggtctaataggtgggactaagttcctcgcccccggtactcctgccagattctcaggctccctgcttggaggcaaggctgccctcaccctctcaggggtacagccagaggatgaggcagaatattactgtgttctatggtacagcaaccgctgggtgttcggtggaggaaccaaactgactgtccta

SEQ ID NO: 339 - protein, 500 aa, Artificial Sequence
  MCSP-G10 HL x I2C HL
QVQLVQSGAEVKRPGASMKVSCKASGYTFTNYYIHWVRQAPGQGLEWMGWINPNSGATNYAQKFQGRVTMTRDTSTSTVYMELSSLRSEDTAVYYCAKSWVSWFASWGQGTLVTVSSGGGGSGGGGSGGGGSDIVMTQSPDSLAVSLGERATINCKSSQSVLSSSNNKNYLNWYQQKPGQPPKLLIYWASTRESGVPDRFSGSGSGTDFTLTISSLQAEDVAVYYCQQHFNTPFAFGQGTKLEIKSGGGGSEVQLVESGGGLVQPGGSLKLSCAASGFTFNKYAMNWVRQAPGKGLEWVARIRSKYNNYATYYADSVKDRFTISRDDSKNTAYLQMNNLKTEDTAVYYCVRHGNFGNSYISYWAYWGQGTLVTVSSGGGGSGGGGSGGGGSQTVVTQEPSLTVSPGGTVTLTCGSSTGAVTSGNYPNWVQQKPGQAPRGLIGGTKFLAPGTPARFSGSLLGGKAALTLSGVQPEDEAEYYCVLWYSNRWVFGGGTKLTVL

SEQ ID NO: 340 - DNA, 1500 bp, Artificial Sequence
  MCSP-G10 HL x I2C HL
caggtgcagctggtccagtctggggctgaggtgaagaggcctggggcctcaatgaaggtctcctgcaaggcttctgggtacaccttcaccaactactatatacactgggtgcgacaggcccctggacaaggtcttgagtggatgggttggatcaaccctaacagtggtgccacaaactatgcacagaagttccagggcagagtcaccatgaccagggacacgtccacgagcacagtctacatggagctgagcagcctgagatctgaggacacggccgtgtattactgtgcgaaatcctgggtctcctggtttgcttcctggggtcaaggaaccttggtcaccgtctcctcaggtggtggtggttctggcggcggcggctccggtggtggtggttctgacatcgtgatgacacagtctccagactccctggctgtgtctctgggcgagagggccaccatcaactgcaagtccagccagagtgtcttatccagctccaacaataagaactacttaaattggtaccagcagaaaccaggacagcctcctaagttgctcatttactgggcatctacccgggaatccggggtccctgaccgattcagtggcagcgggtctgggacagatttcactctcaccatcagcagcctgcaggctgaagatgtggcggtttattactgtcaacaacattttaatactccgttcgcttttggccaggggaccaagctggagatcaaatccggaggtggtggatccgaggtgcagctggtcgagtctggaggaggattggtgcagcctggagggtcattgaaactctcatgtgcagcctctggattcaccttcaataagtacgccatgaactgggtccgccaggctccaggaaagggtttggaatgggttgctcgcataagaagtaaatataataattatgcaacatattatgccgattcagtgaaagacaggttcaccatctccagagatgattcaaaaaacactgcctatctacaaatgaacaacttgaaaactgaggacactgccgtgtactactgtgtgagacatgggaacttcggtaatagctacatatcctactgggcttactggggccaagggactctggtcaccgtctcctcaggtggtggtggttctggcggcggcggctccggtggtggtggttctcagactgttgtgactcaggaaccttcactcaccgtatcacctggtggaacagtcacactcacttgtggctcctcgactggggctgttacatctggcaactacccaaactgggtccaacaaaaaccaggtcaggcaccccgtggtctaataggtgggactaagttcctcgcccccggtactcctgccagattctcaggctccctgcttggaggcaaggctgccctcaccctctcaggggtacagccagaggatgaggcagaatattactgtgttctatggtacagcaaccgctgggtgttcggtggaggaaccaaactgactgtccta

SEQ ID NO: 341 - protein, 8 aa, Homo sapiens
QDGNEEMG

SEQ ID NO: 342 - protein, 8 aa, Saimiri sciureus
QDGNEEIG

SEQ ID NO: 343 - DNA, 20 bp, Artificial Sequence
  Thioate-modified CpG-Oligonucleotide
tccatgacgttcctgatgct

SEQ ID NO: 344 - DNA, 28 bp, Artificial Sequence
  MVH1
gcaggtgcagctcgaggagtcaggacct

SEQ ID NO: 345 - DNA, 27 bp, Artificial Sequence
  MVH2
gaggtccagctcgagcagtctggacct

SEQ ID NO: 346 - DNA, 27 bp, Artificial Sequence
  MVH3
caggtccaactcgagcagcctggggct

SEQ ID NO: 347 - DNA, 27 bp, Artificial Sequence
  MVH4
gaggttcagctcgagcagtctggggca

SEQ ID NO: 348 - DNA, 28 bp, Artificial Sequence
  MVH5
gaaggtgaagctcgaggagtctggagga

SEQ ID NO: 349 - DNA, 27 bp, Artificial Sequence
  MVH6
gaggtgaagcttctcgagtctggaggt

SEQ ID NO: 350 - DNA, 27 bp, Artificial Sequence
  MVH7
gaagtgaagctcgaggagtctggggga

SEQ ID NO: 351 - DNA, 27 bp, Artificial Sequence
  MVH8
gaggttcagctcgagcagtctggagct

SEQ ID NO: 352 - DNA, 34 bp, Artificial Sequence
  MuVHBstEII
tgaggagacggtgaccgtggtcccttggccccag

SEQ ID NO: 353 - DNA, 32 bp, Artificial Sequence
  MUVK1
ccagttccgagctcgttgtgactcaggaatct

SEQ ID NO: 354 - DNA, 32 bp, Artificial Sequence
  MUVK2
ccagttccgagctcgtgttgacgcagccgccc

SEQ ID NO: 355 - DNA, 32 bp, Artificial Sequence
  MUVK3
ccagttccgagctcgtgctcacccagtctcca

SEQ ID NO: 356 - DNA, 32 bp, Artificial Sequence
  MUVK4
ccagttccgagctccagatgacccagtctcca

SEQ ID NO: 357 - DNA, 32 bp, Artificial Sequence
  MUVK5
ccagatgtgagctcgtgatgacccagactcca

SEQ ID NO: 358 - DNA, 32 bp, Artificial Sequence
  MUVK6
ccagatgtgagctcgtcatgacccagtctcca

SEQ ID NO: 359 - DNA, 32 bp, Artificial Sequence
  MUVK7
ccagttccgagctcgtgatgacacagtctcca

SEQ ID NO: 360 - DNA, 39 bp, Artificial Sequence
  MuVkHindIII/BsiW1
tggtgcactagtcgtacgtttgatctcaagcttggtccc

SEQ ID NO: 361 - DNA, 22 bp, Artificial Sequence
  forward primer
gatctggtctacaccatcgagc

SEQ ID NO: 362 - DNA, 24 bp, Artificial Sequence
  reverse primer
ggagctgctgctggctcagtgagg

SEQ ID NO: 363 - DNA, 23 bp, Artificial Sequence
  forward primer
ttccagctgagcatgtctgatgg

SEQ ID NO: 364 - DNA, 21 bp, Artificial Sequence
  reverse primer
cgatcagcatctgggcccagg

SEQ ID NO: 365 - DNA, 25 bp, Artificial Sequence
  forward primer
gtggagcagttcactcagcaggacc

SEQ ID NO: 366 - DNA, 22 bp, Artificial Sequence
  reverse primer
gccttcacacccagtactggcc

SEQ ID NO: 367 - DNA, 59 bp, Artificial Sequence
  forward primer
tcccgtacgagatctggatcccaattggatggcggactcgtgctgttctcacacagagg

SEQ ID NO: 368 - DNA, 45 bp, Artificial Sequence
  reverse primer
agtgggtcgactcacacccagtactggccattcttaagggcaggg

SEQ ID NO: 369 - DNA, 64 bp, Artificial Sequence
  forward primer
gaggaattcaccatgccgctgctgctactgctgcccctgctgtgggcaggggccctggctatgg

SEQ ID NO: 370 - DNA, 26 bp, Artificial Sequence
  reverse primer
gatttgtaactgtatttggtacttcc

SEQ ID NO: 371 - DNA, 21 bp, Artificial Sequence
  forward primer
attccgcctccttggggatcc

SEQ ID NO: 372 - DNA, 25 bp, Artificial Sequence
  reverse primer
gcataggagacattgagctggatgg

SEQ ID NO: 373 - DNA, 21 bp, Artificial Sequence
  forward primer
gcaccaacctgacctgtcagg

SEQ ID NO: 374 - DNA, 39 bp, Artificial Sequence
  reverse primer
agtgggtcgactcactgggtcctgacctctgagtattcg

SEQ ID NO: 375 - protein, 106 aa, Artificial Sequence
  PSCA-1 VL
DIQLTQSPSSLSASVGDRVTITCSASSSVRFIHWYQQKPGKAPKRLIYDTSKLASGVPSRFSGSGSGTDFTLTISSLQPEDFATYYCQQWSSSPFTFGQGTKVEIK

SEQ ID NO: 376 - DNA, 318 bp, Artificial Sequence
  PSCA-1 VL
gacatccagctgacccagagcccatccagcctgtctgctagcgtgggcgacagagtgaccatcacctgcagcgccagcagcagcgtgcggttcatccactggtatcagcagaagcccggcaaggcccccaagaggctgatctacgacaccagcaagctggctagcggcgtgccaagcagattcagcggcagcggctccggcaccgacttcaccctgaccatcagcagcctgcagccagaggacttcgctacctattactgccagcagtggagcagcagccccttcaccttcggccagggcaccaaggtggagatcaag

SEQ ID NO: 377 - protein, 10 aa, Artificial Sequence
  PSCA-1 LCDR1
SASSSVRFIH

SEQ ID NO: 378 - protein, 7 aa, Artificial Sequence
  PSCA-1 LCDR2
DTSKLAS

SEQ ID NO: 379 - protein, 9 aa, Artificial Sequence
  PSCA-1 LCDR3
QQWSSSPFT

SEQ ID NO: 380 - protein, 112 aa, Artificial Sequence
  PSCA-1 H
EVQLVESGGGLVQPGGSLRLSCAASGFNIKDYYIHWVRQAPGKGLEWVAWIDPENGDTEFVPKFQGRATISADTSKNTAYLQMNSLRAEDTAVYYCKTGGFWGQGTLVTVSS

SEQ ID NO: 381 - DNA, 336 bp, Artificial Sequence
  PSCA-1 H
gaggtgcagctggtcgagtctggcggaggactggtgcagccaggcggctccctgagactgagctgcgccgccagcggcttcaacatcaaggactactacatccactgggtccggcaggctccaggcaagggactggaatgggtggcctggatcgacccagagaacggcgacaccgagttcgtgcccaagttccagggcagagccaccatcagcgccgacacctccaagaacaccgcctacctgcagatgaacagcctgagggccgaggacaccgccgtgtactactgcaagaccggcggcttctggggacagggcaccctggtcaccgtgtcctcc

SEQ ID NO: 382 - protein, 5 aa, Artificial Sequence
  PSCA-1 HCDR1
DYYIH

SEQ ID NO: 383 - protein, 17 aa, Artificial Sequence
  PSCA-1 HCDR2
WIDPENGDTEFVPKFQG

SEQ ID NO: 384 - protein, 3 aa, Artificial Sequence
  PSCA-1 HCDR3
GGF

SEQ ID NO: 385 - protein, 233 aa, Artificial Sequence
  PSCA-1 HL
EVQLVESGGGLVQPGGSLRLSCAASGFNIKDYYIHWVRQAPGKGLEWVAWIDPENGDTEFVPKFQGRATISADTSKNTAYLQMNSLRAEDTAVYYCKTGGFWGQGTLVTVSSGGGGSGGGGSGGGGSDIQLTQSPSSLSASVGDRVTITCSASSSVRFIHWYQQKPGKAPKRLIYDTSKLASGVPSRFSGSGSGTDFTLTISSLQPEDFATYYCQQWSSSPFTFGQGTKVEIK

SEQ ID NO: 386 - DNA, 699 bp, Artificial Sequence
  PSCA-1 HL
gaggtgcagctggtcgagtctggcggaggactggtgcagccaggcggctccctgagactgagctgcgccgccagcggcttcaacatcaaggactactacatccactgggtccggcaggctccaggcaagggactggaatgggtggcctggatcgacccagagaacggcgacaccgagttcgtgcccaagttccagggcagagccaccatcagcgccgacacctccaagaacaccgcctacctgcagatgaacagcctgagggccgaggacaccgccgtgtactactgcaagaccggcggcttctggggacagggcaccctggtcaccgtgtcctccggtggtggtggttctggcggcggcggctccggtggtggtggttctgacatccagctgacccagagcccatccagcctgtctgctagcgtgggcgacagagtgaccatcacctgcagcgccagcagcagcgtgcggttcatccactggtatcagcagaagcccggcaaggcccccaagaggctgatctacgacaccagcaagctggctagcggcgtgccaagcagattcagcggcagcggctccggcaccgacttcaccctgaccatcagcagcctgcagccagaggacttcgctacctattactgccagcagtggagcagcagccccttcaccttcggccagggcaccaaggtggagatcaag

SEQ ID NO: 387 - protein, 233 aa, Artificial Sequence
  PSCA-1 LH
DIQLTQSPSSLSASVGDRVTITCSASSSVRFIHWYQQKPGKAPKRLIYDTSKLASGVPSRFSGSGSGTDFTLTISSLQPEDFATYYCQQWSSSPFTFGQGTKVEIKGGGGSGGGGSGGGGSEVQLVESGGGLVQPGGSLRLSCAASGFNIKDYYIHWVRQAPGKGLEWVAWIDPENGDTEFVPKFQGRATISADTSKNTAYLQMNSLRAEDTAVYYCKTGGFWGQGTLVTVSS

SEQ ID NO: 388 - DNA, 699 bp, Artificial Sequence
  PSCA-1 LH
gacatccagctgacccagagcccatccagcctgtctgctagcgtgggcgacagagtgaccatcacctgcagcgccagcagcagcgtgcggttcatccactggtatcagcagaagcccggcaaggcccccaagaggctgatctacgacaccagcaagctggctagcggcgtgccaagcagattcagcggcagcggctccggcaccgacttcaccctgaccatcagcagcctgcagccagaggacttcgctacctattactgccagcagtggagcagcagccccttcaccttcggccagggcaccaaggtggagatcaagggtggtggtggttctggcggcggcggctccggtggtggtggttctgaggtgcagctggtcgagtctggcggaggactggtgcagccaggcggctccctgagactgagctgcgccgccagcggcttcaacatcaaggactactacatccactgggtccggcaggctccaggcaagggactggaatgggtggcctggatcgacccagagaacggcgacaccgagttcgtgcccaagttccagggcagagccaccatcagcgccgacacctccaagaacaccgcctacctgcagatgaacagcctgagggccgaggacaccgccgtgtactactgcaagaccggcggcttctggggacagggcaccctggtcaccgtgtcctcc

SEQ ID NO: 389 - protein, 488 aa, Artificial Sequence
  PSCA-1 HL x I2C HL
EVQLVESGGGLVQPGGSLRLSCAASGFNIKDYYIHWVRQAPGKGLEWVAWIDPENGDTEFVPKFQGRATISADTSKNTAYLQMNSLRAEDTAVYYCKTGGFWGQGTLVTVSSGGGGSGGGGSGGGGSDIQLTQSPSSLSASVGDRVTITCSASSSVRFIHWYQQKPGKAPKRLIYDTSKLASGVPSRFSGSGSGTDFTLTISSLQPEDFATYYCQQWSSSPFTFGQGTKVEIKSGGGGSEVQLVESGGGLVQPGGSLKLSCAASGFTFNKYAMNWVRQAPGKGLEWVARIRSKYNNYATYYADSVKDRFTISRDDSKNTAYLQMNNLKTEDTAVYYCVRHGNFGNSYISYWAYWGQGTLVTVSSGGGGSGGGGSGGGGSQTVVTQEPSLTVSPGGTVTLTCGSSTGAVTSGNYPNWVQQKPGQAPRGLIGGTKFLAPGTPARFSGSLLGGKAALTLSGVQPEDEAEYYCVLWYSNRWVFGGGTKLTVL

SEQ ID NO: 390 - DNA, 1464 bp, Artificial Sequence
  PSCA-1 HL x I2C HL
gaggtgcagctggtcgagtctggcggaggactggtgcagccaggcggctccctgagactgagctgcgccgccagcggcttcaacatcaaggactactacatccactgggtccggcaggctccaggcaagggactggaatgggtggcctggatcgacccagagaacggcgacaccgagttcgtgcccaagttccagggcagagccaccatcagcgccgacacctccaagaacaccgcctacctgcagatgaacagcctgagggccgaggacaccgccgtgtactactgcaagaccggcggcttctggggacagggcaccctggtcaccgtgtcctccggtggtggtggttctggcggcggcggctccggtggtggtggttctgacatccagctgacccagagcccatccagcctgtctgctagcgtgggcgacagagtgaccatcacctgcagcgccagcagcagcgtgcggttcatccactggtatcagcagaagcccggcaaggcccccaagaggctgatctacgacaccagcaagctggctagcggcgtgccaagcagattcagcggcagcggctccggcaccgacttcaccctgaccatcagcagcctgcagccagaggacttcgctacctattactgccagcagtggagcagcagccccttcaccttcggccagggcaccaaggtggagatcaagtccggaggtggtggatccgaggtgcagctggtcgagtctggaggaggattggtgcagcctggagggtcattgaaactctcatgtgcagcctctggattcaccttcaataagtacgccatgaactgggtccgccaggctccaggaaagggtttggaatgggttgctcgcataagaagtaaatataataattatgcaacatattatgccgattcagtgaaagacaggttcaccatctccagagatgattcaaaaaacactgcctatctacaaatgaacaacttgaaaactgaggacactgccgtgtactactgtgtgagacatgggaacttcggtaatagctacatatcctactgggcttactggggccaagggactctggtcaccgtctcctcaggtggtggtggttctggcggcggcggctccggtggtggtggttctcagactgttgtgactcaggaaccttcactcaccgtatcacctggtggaacagtcacactcacttgtggctcctcgactggggctgttacatctggcaactacccaaactgggtccaacaaaaaccaggtcaggcaccccgtggtctaataggtgggactaagttcctcgcccccggtactcctgccagattctcaggctccctgcttggaggcaaggctgccctcaccctctcaggggtacagccagaggatgaggcagaatattactgtgttctatggtacagcaaccgctgggtgttcggtggaggaaccaaactgactgtccta

SEQ ID NO: 391 - protein, 487 aa, Artificial Sequence
  PSCA-1 LH x I2C HL
DIQLTQSPSSLSASVGDRVTITCSASSSVRFIHWYQQKPGKAPKRLIYDTSKLASGVPSRFSGSGSGTDFTLTISSLQPEDFATYYCQQWSSSPFTFGQGTKVEIKGGGGSGGGGSGGGGSEVQLVESGGGLVQPGGSLRLSCAASGFNIKDYYIHWVRQAPGKGLEWVAWIDPENGDTEFVPKFQGRATISADTSKNTAYLQMNSLRAEDTAVYYCKTGGFWGQGTLVTVSSGGGGSEVQLVESGGGLVQPGGSLKLSCAASGFTFNKYAMNWVRQAPGKGLEWVARIRSKYNNYATYYADSVKDRFTISRDDSKNTAYLQMNNLKTEDTAVYYCVRHGNFGNSYISYWAYWGQGTLVTVSSGGGGSGGGGSGGGGSQTVVTQEPSLTVSPGGTVTLTCGSSTGAVTSGNYPNWVQQKPGQAPRGLIGGTKFLAPGTPARFSGSLLGGKAALTLSGVQPEDEAEYYCVLWYSNRWVFGGGTKLTVL

SEQ ID NO: 392 - DNA, 1461 bp, Artificial Sequence
  PSCA-1 LH x I2C HL
gacatccagctgacccagagcccatccagcctgtctgctagcgtgggcgacagagtgaccatcacctgcagcgccagcagcagcgtgcggttcatccactggtatcagcagaagcccggcaaggcccccaagaggctgatctacgacaccagcaagctggctagcggcgtgccaagcagattcagcggcagcggctccggcaccgacttcaccctgaccatcagcagcctgcagccagaggacttcgctacctattactgccagcagtggagcagcagccccttcaccttcggccagggcaccaaggtggagatcaagggtggtggtggttctggcggcggcggctccggtggtggtggttctgaggtgcagctggtcgagtctggcggaggactggtgcagccaggcggctccctgagactgagctgcgccgccagcggcttcaacatcaaggactactacatccactgggtccggcaggctccaggcaagggactggaatgggtggcctggatcgacccagagaacggcgacaccgagttcgtgcccaagttccagggcagagccaccatcagcgccgacacctccaagaacaccgcctacctgcagatgaacagcctgagggccgaggacaccgccgtgtactactgcaagaccggcggcttctggggacagggcaccctggtcaccgtgtcctccggaggtggtggatccgaggtgcagctggtcgagtctggaggaggattggtgcagcctggagggtcattgaaactctcatgtgcagcctctggattcaccttcaataagtacgccatgaactgggtccgccaggctccaggaaagggtttggaatgggttgctcgcataagaagtaaatataataattatgcaacatattatgccgattcagtgaaagacaggttcaccatctccagagatgattcaaaaaacactgcctatctacaaatgaacaacttgaaaactgaggacactgccgtgtactactgtgtgagacatgggaacttcggtaatagctacatatcctactgggcttactggggccaagggactctggtcaccgtctcctcaggtggtggtggttctggcggcggcggctccggtggtggtggttctcagactgttgtgactcaggaaccttcactcaccgtatcacctggtggaacagtcacactcacttgtggctcctcgactggggctgttacatctggcaactacccaaactgggtccaacaaaaaccaggtcaggcaccccgtggtctaataggtgggactaagttcctcgcccccggtactcctgccagattctcaggctccctgcttggaggcaaggctgccctcaccctctcaggggtacagccagaggatgaggcagaatattactgtgttctatggtacagcaaccgctgggtgttcggtggaggaaccaaactgactgtccta

SEQ ID NO: 393 - protein, 112 aa, Artificial Sequence
  PSCA-2 VL
DIVMTQAAPSVPVTPGESVSISCRSSKSLLHSNGNTYLYWFLQRPGQSPQLLIYRMSNLASGVPDRFSGSGSGTAFTLRISRVEAEDVGVYYCLQHLEYPYTFGGGTKLELK

SEQ ID NO: 394 - DNA, 336 bp, Artificial Sequence
  PSCA-2 VL
gacatcgtgatgacccaggccgctccaagcgtgccagtgaccccaggcgagagcgtgtccatcagctgcaggtccagcaagagcctgctgcacagcaacggcaacacctacctgtactggtttctgcagaggccaggccagagcccccagctgctgatctacaggatgagcaacctggctagcggcgtgccagacagattcagcggcagcggctctggaaccgccttcaccctgaggatcagcagggtggaggccgaggacgtgggcgtgtactactgcctgcagcacctggaatacccctacaccttcggcggagggaccaagctggaactgaag

SEQ ID NO: 395 - protein, 16 aa, Artificial Sequence
  PSCA-2 LCDR1
RSSKSLLHSNGNTYLY

SEQ ID NO: 396 - protein, 7 aa, Artificial Sequence
  PSCA-2 LCDR2
RMSNLAS

SEQ ID NO: 397 - protein, 9 aa, Artificial Sequence
  PSCA-2 LCDR3
LQHLEYPYT

SEQ ID NO: 398 - protein, 117 aa, Artificial Sequence
  PSCA-2 H
QVQVQQPGAELVKPGAPVKLSCKASGYTFTNYWLNWVKQRPGRGLEWIGRIDPSDSEIHYDQKFKDKATLTVDKSSSTAYIQLSSLTSEDSAVYYCALTGIYAMAYWGQGTSVTVSS

SEQ ID NO: 399 - DNA, 351 bp, Artificial Sequence
  PSCA-2 H
caggtgcaggtgcagcagccaggcgccgaactggtcaagcctggcgccccagtgaagctgtcctgcaaggccagcggctacaccttcaccaactactggctgaactgggtgaaacagaggcccggcaggggcctggaatggatcggcaggatcgaccccagcgacagcgagatccactacgaccagaagttcaaggacaaggccaccctgaccgtggacaagagcagcagcaccgcctacatccagctgtccagcctgaccagcgaggacagcgccgtgtactattgcgccctgaccggcatctacgccatggcctactggggccagggcaccagcgtgaccgtgtcttcc

SEQ ID NO: 400 - protein, 5 aa, Artificial Sequence
  PSCA-2 HCDR1
NYWLN

SEQ ID NO: 401 - protein, 17 aa, Artificial Sequence
  PSCA-2 HCDR2
RIDPSDSEIHYDQKFKD

SEQ ID NO: 402 - protein, 8 aa, Artificial Sequence
  PSCA-2 HCDR3
TGIYAMAY

SEQ ID NO: 403 - protein, 244 aa, Artificial Sequence
  PSCA-2 LH
DIVMTQAAPSVPVTPGESVSISCRSSKSLLHSNGNTYLYWFLQRPGQSPQLLIYRMSNLASGVPDRFSGSGSGTAFTLRISRVEAEDVGVYYCLQHLEYPYTFGGGTKLELKGGGGSGGGGSGGGGSQVQVQQPGAELVKPGAPVKLSCKASGYTFTNYWLNWVKQRPGRGLEWIGRIDPSDSEIHYDQKFKDKATLTVDKSSSTAYIQLSSLTSEDSAVYYCALTGIYAMAYWGQGTSVTVSS

SEQ ID NO: 404 - DNA, 732 bp, Artificial Sequence
  PSCA-2 LH
gacatcgtgatgacccaggccgctccaagcgtgccagtgaccccaggcgagagcgtgtccatcagctgcaggtccagcaagagcctgctgcacagcaacggcaacacctacctgtactggtttctgcagaggccaggccagagcccccagctgctgatctacaggatgagcaacctggctagcggcgtgccagacagattcagcggcagcggctctggaaccgccttcaccctgaggatcagcagggtggaggccgaggacgtgggcgtgtactactgcctgcagcacctggaatacccctacaccttcggcggagggaccaagctggaactgaagggtggtggtggttctggcggcggcggctccggtggtggtggttctcaggtgcaggtgcagcagccaggcgccgaactggtcaagcctggcgccccagtgaagctgtcctgcaaggccagcggctacaccttcaccaactactggctgaactgggtgaaacagaggcccggcaggggcctggaatggatcggcaggatcgaccccagcgacagcgagatccactacgaccagaagttcaaggacaaggccaccctgaccgtggacaagagcagcagcaccgcctacatccagctgtccagcctgaccagcgaggacagcgccgtgtactattgcgccctgaccggcatctacgccatggcctactggggccagggcaccagcgtgaccgtgtcttcc

SEQ ID NO: 405 - protein, 498 aa, Artificial Sequence
  PSCA-2 LH x I2C HL
DIVMTQAAPSVPVTPGESVSISCRSSKSLLHSNGNTYLYWFLQRPGQSPQLLIYRMSNLASGVPDRFSGSGSGTAFTLRISRVEAEDVGVYYCLQHLEYPYTFGGGTKLELKGGGGSGGGGSGGGGSQVQVQQPGAELVKPGAPVKLSCKASGYTFTNYWLNWVKQRPGRGLEWIGRIDPSDSEIHYDQKFKDKATLTVDKSSSTAYIQLSSLTSEDSAVYYCALTGIYAMAYWGQGTSVTVSSGGGGSEVQLVESGGGLVQPGGSLKLSCAASGFTFNKYAMNWVRQAPGKGLEWVARIRSKYNNYATYYADSVKDRFTISRDDSKNTAYLQMNNLKTEDTAVYYCVRHGNFGNSYISYWAYWGQGTLVTVSSGGGGSGGGGSGGGGSQTVVTQEPSLTVSPGGTVTLTCGSSTGAVTSGNYPNWVQQKPGQAPRGLIGGTKFLAPGTPARFSGSLLGGKAALTLSGVQPEDEAEYYCVLWYSNRWVFGGGTKLTVL

SEQ ID NO: 406 - DNA, 1494 bp, Artificial Sequence
  PSCA-2 LH x I2C HL
gacatcgtgatgacccaggccgctccaagcgtgccagtgaccccaggcgagagcgtgtccatcagctgcaggtccagcaagagcctgctgcacagcaacggcaacacctacctgtactggtttctgcagaggccaggccagagcccccagctgctgatctacaggatgagcaacctggctagcggcgtgccagacagattcagcggcagcggctctggaaccgccttcaccctgaggatcagcagggtggaggccgaggacgtgggcgtgtactactgcctgcagcacctggaatacccctacaccttcggcggagggaccaagctggaactgaagggtggtggtggttctggcggcggcggctccggtggtggtggttctcaggtgcaggtgcagcagccaggcgccgaactggtcaagcctggcgccccagtgaagctgtcctgcaaggccagcggctacaccttcaccaactactggctgaactgggtgaaacagaggcccggcaggggcctggaatggatcggcaggatcgaccccagcgacagcgagatccactacgaccagaagttcaaggacaaggccaccctgaccgtggacaagagcagcagcaccgcctacatccagctgtccagcctgaccagcgaggacagcgccgtgtactattgcgccctgaccggcatctacgccatggcctactggggccagggcaccagcgtgaccgtgtcttccggaggtggtggatccgaggtgcagctggtcgagtctggaggaggattggtgcagcctggagggtcattgaaactctcatgtgcagcctctggattcaccttcaataagtacgccatgaactgggtccgccaggctccaggaaagggtttggaatgggttgctcgcataagaagtaaatataataattatgcaacatattatgccgattcagtgaaagacaggttcaccatctccagagatgattcaaaaaacactgcctatctacaaatgaacaacttgaaaactgaggacactgccgtgtactactgtgtgagacatgggaacttcggtaatagctacatatcctactgggcttactggggccaagggactctggtcaccgtctcctcaggtggtggtggttctggcggcggcggctccggtggtggtggttctcagactgttgtgactcaggaaccttcactcaccgtatcacctggtggaacagtcacactcacttgtggctcctcgactggggctgttacatctggcaactacccaaactgggtccaacaaaaaccaggtcaggcaccccgtggtctaataggtgggactaagttcctcgcccccggtactcctgccagattctcaggctccctgcttggaggcaaggctgccctcaccctctcaggggtacagccagaggatgaggcagaatattactgtgttctatggtacagcaaccgctgggtgttcggtggaggaaccaaactgactgtccta

SEQ ID NO: 407 - protein, 112 aa, Artificial Sequence
  PSCA-3 VL
DVVMTQTPLTLSVTIGQPASISCKSSQSLLDSDGKTYLNWLLQRPGQSPKRLIYLVSTLDSGVPDRFTGSGSGTDFTLKISRVEAEDLGVYYCWQGTHFPRTFGGGTKLEIK

SEQ ID NO: 408 - DNA, 336 bp, Artificial Sequence
  PSCA-3 VL
gacgtggtcatgacccagacccccctgaccctgagcgtgaccatcggccagccagccagcatctcttgcaagtccagccagtccctgctggacagcgacggcaagacctacctgaactggctgctgcagaggccaggccagagccccaagaggctgatctacctggtgtccaccctggacagcggcgtgccagacagattcaccggcagcggctccggcaccgacttcaccctgaagatcagcagggtggaggccgaggacctgggcgtgtactactgctggcagggcacccacttcccaaggaccttcggcggagggaccaagctggaaatcaag

SEQ ID NO: 409 - protein, 16 aa, Artificial Sequence
  PSCA-3 LCDR1
KSSQSLLDSDGKTYLN

SEQ ID NO: 410 - protein, 7 aa, Artificial Sequence
  PSCA-3 LCDR2
LVSTLDS

SEQ ID NO: 411 - protein, 9 aa, Artificial Sequence
  PSCA-3 LCDR3
WQGTHFPRT

SEQ ID NO: 412 - protein, 114 aa, Artificial Sequence
  PSCA-3 H
EVQLQQSGPDLEKPGASVKISCKPSGNSFTGYYIHWVKQSHGKSLEWIGRVDPNNGFTSYNQKFKGKAILTVDKSSSTAYMELRSLTSEDSAVYYCVGNFFDSWGQGTTLTVSS

SEQ ID NO: 413 - DNA, 342 bp, Artificial Sequence
  PSCA-3 H
gaagtgcagctgcagcagagcggcccagacctggaaaagccaggcgccagcgtgaagatttcctgcaagcccagcggcaacagcttcaccggctactacatccactgggtgaaacagtcccacgggaagagcctggaatggatcggcagagtggaccccaacaacggcttcacctcctacaaccagaagttcaagggcaaggccatcctgaccgtggacaagagcagcagcaccgcctacatggaactgagaagcctgaccagcgaggacagcgccgtgtactattgcgtgggcaacttcttcgacagctggggccagggaaccacactgaccgtgtcctcc

SEQ ID NO: 414 - protein, 5 aa, Artificial Sequence
  PSCA-3 HCDR1
GYYIH

SEQ ID NO: 415 - protein, 17 aa, Artificial Sequence
  PSCA-3 HCDR2
RVDPNNGFTSYNQKFKG

SEQ ID NO: 416 - protein, 5 aa, Artificial Sequence
  PSCA-3 HCDR3
NFFDS

SEQ ID NO: 417 - protein, 241 aa, Artificial Sequence
  PSCA-3 HL
EVQLQQSGPDLEKPGASVKISCKPSGNSFTGYYIHWVKQSHGKSLEWIGRVDPNNGFTSYNQKFKGKAILTVDKSSSTAYMELRSLTSEDSAVYYCVGNFFDSWGQGTTLTVSSGGGGSGGGGSGGGGSDVVMTQTPLTLSVTIGQPASISCKSSQSLLDSDGKTYLNWLLQRPGQSPKRLIYLVSTLDSGVPDRFTGSGSGTDFTLKISRVEAEDLGVYYCWQGTHFPRTFGGGTKLEIK

SEQ ID NO: 418 - DNA, 723 bp, Artificial Sequence
  PSCA-3 HL
gaagtgcagctgcagcagagcggcccagacctggaaaagccaggcgccagcgtgaagatttcctgcaagcccagcggcaacagcttcaccggctactacatccactgggtgaaacagtcccacgggaagagcctggaatggatcggcagagtggaccccaacaacggcttcacctcctacaaccagaagttcaagggcaaggccatcctgaccgtggacaagagcagcagcaccgcctacatggaactgagaagcctgaccagcgaggacagcgccgtgtactattgcgtgggcaacttcttcgacagctggggccagggaaccacactgaccgtgtcctccggtggtggtggttctggcggcggcggctccggtggtggtggttctgacgtggtcatgacccagacccccctgaccctgagcgtgaccatcggccagccagccagcatctcttgcaagtccagccagtccctgctggacagcgacggcaagacctacctgaactggctgctgcagaggccaggccagagccccaagaggctgatctacctggtgtccaccctggacagcggcgtgccagacagattcaccggcagcggctccggcaccgacttcaccctgaagatcagcagggtggaggccgaggacctgggcgtgtactactgctggcagggcacccacttcccaaggaccttcggcggagggaccaagctggaaatcaag

SEQ ID NO: 419 - protein, 241 aa, Artificial Sequence
  PSCA-3 LH
DVVMTQTPLTLSVTIGQPASISCKSSQSLLDSDGKTYLNWLLQRPGQSPKRLIYLVSTLDSGVPDRFTGSGSGTDFTLKISRVEAEDLGVYYCWQGTHFPRTFGGGTKLEIKGGGGSGGGGSGGGGSEVQLQQSGPDLEKPGASVKISCKPSGNSFTGYYIHWVKQSHGKSLEWIGRVDPNNGFTSYNQKFKGKAILTVDKSSSTAYMELRSLTSEDSAVYYCVGNFFDSWGQGTTLTVSS

SEQ ID NO: 420 - protein, 723 aa, Artificial Sequence
  PSCA-3 LH
GACGTGGTCATGACCCAGACCCCCCTGACCCTGAGCGTGACCATCGGCCAGCCAGCCAGCATCTCTTGCAAGTCCAGCCAGTCCCTGCTGGACAGCGACGGCAAGACCTACCTGAACTGGCTGCTGCAGAGGCCAGGCCAGAGCCCCAAGAGGCTGATCTACCTGGTGTCCACCCTGGACAGCGGCGTGCCAGACAGATTCACCGGCAGCGGCTCCGGCACCGACTTCACCCTGAAGATCAGCAGGGTGGAGGCCGAGGACCTGGGCGTGTACTACTGCTGGCAGGGCACCCACTTCCCAAGGACCTTCGGCGGAGGGACCAAGCTGGAAATCAAGGGTGGTGGTGGTTCTGGCGGCGGCGGCTCCGGTGGTGGTGGTTCTGAAGTGCAGCTGCAGCAGAGCGGCCCAGACCTGGAAAAGCCAGGCGCCAGCGTGAAGATTTCCTGCAAGCCCAGCGGCAACAGCTTCACCGGCTACTACATCCACTGGGTGAAACAGTCCCACGGGAAGAGCCTGGAATGGATCGGCAGAGTGGACCCCAACAACGGCTTCACCTCCTACAACCAGAAGTTCAAGGGCAAGGCCATCCTGACCGTGGACAAGAGCAGCAGCACCGCCTACATGGAACTGAGAAGCCTGACCAGCGAGGACAGCGCCGTGTACTATTGCGTGGGCAACTTCTTCGACAGCTGGGGCCAGGGAACCACACTGACCGTGTCCTCC

SEQ ID NO: 421 - protein, 496 aa, Artificial Sequence
  PSCA-3 HL x I2C HL
EVQLQQSGPDLEKPGASVKISCKPSGNSFTGYYIHWVKQSHGKSLEWIGRVDPNNGFTSYNQKFKGKAILTVDKSSSTAYMELRSLTSEDSAVYYCVGNFFDSWGQGTTLTVSSGGGGSGGGGSGGGGSDVVMTQTPLTLSVTIGQPASISCKSSQSLLDSDGKTYLNWLLQRPGQSPKRLIYLVSTLDSGVPDRFTGSGSGTDFTLKISRVEAEDLGVYYCWQGTHFPRTFGGGTKLEIKSGGGGSEVQLVESGGGLVQPGGSLKLSCAASGFTFNKYAMNWVRQAPGKGLEWVARIRSKYNNYATYYADSVKDRFTISRDDSKNTAYLQMNNLKTEDTAVYYCVRHGNFGNSYISYWAYWGQGTLVTVSSGGGGSGGGGSGGGGSQTVVTQEPSLTVSPGGTVTLTCGSSTGAVTSGNYPNWVQQKPGQAPRGLIGGTKFLAPGTPARFSGSLLGGKAALTLSGVQPEDEAEYYCVLWYSNRWVFGGGTKLTVL

SEQ ID NO: 422 - DNA, 1488 bp, Artificial Sequence
  PSCA-3 HL x I2C HL
gaagtgcagctgcagcagagcggcccagacctggaaaagccaggcgccagcgtgaagatttcctgcaagcccagcggcaacagcttcaccggctactacatccactgggtgaaacagtcccacgggaagagcctggaatggatcggcagagtggaccccaacaacggcttcacctcctacaaccagaagttcaagggcaaggccatcctgaccgtggacaagagcagcagcaccgcctacatggaactgagaagcctgaccagcgaggacagcgccgtgtactattgcgtgggcaacttcttcgacagctggggccagggaaccacactgaccgtgtcctccggtggtggtggttctggcggcggcggctccggtggtggtggttctgacgtggtcatgacccagacccccctgaccctgagcgtgaccatcggccagccagccagcatctcttgcaagtccagccagtccctgctggacagcgacggcaagacctacctgaactggctgctgcagaggccaggccagagccccaagaggctgatctacctggtgtccaccctggacagcggcgtgccagacagattcaccggcagcggctccggcaccgacttcaccctgaagatcagcagggtggaggccgaggacctgggcgtgtactactgctggcagggcacccacttcccaaggaccttcggcggagggaccaagctggaaatcaagtccggaggtggtggatccgaggtgcagctggtcgagtctggaggaggattggtgcagcctggagggtcattgaaactctcatgtgcagcctctggattcaccttcaataagtacgccatgaactgggtccgccaggctccaggaaagggtttggaatgggttgctcgcataagaagtaaatataataattatgcaacatattatgccgattcagtgaaagacaggttcaccatctccagagatgattcaaaaaacactgcctatctacaaatgaacaacttgaaaactgaggacactgccgtgtactactgtgtgagacatgggaacttcggtaatagctacatatcctactgggcttactggggccaagggactctggtcaccgtctcctcaggtggtggtggttctggcggcggcggctccggtggtggtggttctcagactgttgtgactcaggaaccttcactcaccgtatcacctggtggaacagtcacactcacttgtggctcctcgactggggctgttacatctggcaactacccaaactgggtccaacaaaaaccaggtcaggcaccccgtggtctaataggtgggactaagttcctcgcccccggtactcctgccagattctcaggctccctgcttggaggcaaggctgccctcaccctctcaggggtacagccagaggatgaggcagaatattactgtgttctatggtacagcaaccgctgggtgttcggtggaggaaccaaactgactgtccta

SEQ ID NO: 423 - protein, 495 aa, Artificial Sequence
  PSCA-3 LH x I2C HL
DVVMTQTPLTLSVTIGQPASISCKSSQSLLDSDGKTYLNWLLQRPGQSPKRLIYLVSTLDSGVPDRFTGSGSGTDFTLKISRVEAEDLGVYYCWQGTHFPRTFGGGTKLEIKGGGGSGGGGSGGGGSEVQLQQSGPDLEKPGASVKISCKPSGNSFTGYYIHWVKQSHGKSLEWIGRVDPNNGFTSYNQKFKGKAILTVDKSSSTAYMELRSLTSEDSAVYYCVGNFFDSWGQGTTLTVSSGGGGSEVQLVESGGGLVQPGGSLKLSCAASGFTFNKYAMNWVRQAPGKGLEWVARIRSKYNNYATYYADSVKDRFTISRDDSKNTAYLQMNNLKTEDTAVYYCVRHGNFGNSYISYWAYWGQGTLVTVSSGGGGSGGGGSGGGGSQTVVTQEPSLTVSPGGTVTLTCGSSTGAVTSGNYPNWVQQKPGQAPRGLIGGTKFLAPGTPARFSGSLLGGKAALTLSGVQPEDEAEYYCVLWYSNRWVFGGGTKLTVL

SEQ ID NO: 424 - DNA, 1485 bp, Artificial Sequence
  PSCA-3 LH x I2C HL
gacgtggtcatgacccagacccccctgaccctgagcgtgaccatcggccagccagccagcatctcttgcaagtccagccagtccctgctggacagcgacggcaagacctacctgaactggctgctgcagaggccaggccagagccccaagaggctgatctacctggtgtccaccctggacagcggcgtgccagacagattcaccggcagcggctccggcaccgacttcaccctgaagatcagcagggtggaggccgaggacctgggcgtgtactactgctggcagggcacccacttcccaaggaccttcggcggagggaccaagctggaaatcaagggtggtggtggttctggcggcggcggctccggtggtggtggttctgaagtgcagctgcagcagagcggcccagacctggaaaagccaggcgccagcgtgaagatttcctgcaagcccagcggcaacagcttcaccggctactacatccactgggtgaaacagtcccacgggaagagcctggaatggatcggcagagtggaccccaacaacggcttcacctcctacaaccagaagttcaagggcaaggccatcctgaccgtggacaagagcagcagcaccgcctacatggaactgagaagcctgaccagcgaggacagcgccgtgtactattgcgtgggcaacttcttcgacagctggggccagggaaccacactgaccgtgtcctccggaggtggtggatccgaggtgcagctggtcgagtctggaggaggattggtgcagcctggagggtcattgaaactctcatgtgcagcctctggattcaccttcaataagtacgccatgaactgggtccgccaggctccaggaaagggtttggaatgggttgctcgcataagaagtaaatataataattatgcaacatattatgccgattcagtgaaagacaggttcaccatctccagagatgattcaaaaaacactgcctatctacaaatgaacaacttgaaaactgaggacactgccgtgtactactgtgtgagacatgggaacttcggtaatagctacatatcctactgggcttactggggccaagggactctggtcaccgtctcctcaggtggtggtggttctggcggcggcggctccggtggtggtggttctcagactgttgtgactcaggaaccttcactcaccgtatcacctggtggaacagtcacactcacttgtggctcctcgactggggctgttacatctggcaactacccaaactgggtccaacaaaaaccaggtcaggcaccccgtggtctaataggtgggactaagttcctcgcccccggtactcctgccagattctcaggctccctgcttggaggcaaggctgccctcaccctctcaggggtacagccagaggatgaggcagaatattactgtgttctatggtacagcaaccgctgggtgttcggtggaggaaccaaactgactgtccta

SEQ ID NO: 425 - protein, 106 aa, Artificial Sequence
  PSCA-4 VL
QVVLTQSPAIMSASPGEKVTMACSASSSVRFIHWYQQKSGTSPKRWIYDTSKLASGVPTRFSGSGSGTSYSLTISTMEAEDAATYYCQQWSSSPFTFGSGTKLIIK

SEQ ID NO: 426 - DNA, 318 bp, Artificial Sequence
  PSCA-4 VL
caggtggtgctgacccagagcccagccatcatgagcgccagcccaggcgagaaagtgaccatggcctgcagcgccagcagcagcgtgcggttcatccactggtatcagcagaagtccggcaccagccccaagagatggatctacgacaccagcaagctggctagcggcgtgccaaccagattcagcggaagcggctccggcacctcctacagcctgaccatcagcaccatggaagccgaggacgccgccacctactactgccagcagtggagcagcagccccttcaccttcggcagcggcaccaagctgatcatcaag

SEQ ID NO: 427 - protein, 10 aa, Artificial Sequence
  PSCA-4 LCDR1
SASSSVRFIH

SEQ ID NO: 428 - protein, 7 aa, Artificial Sequence
  PSCA-4 LCDR2
DTSKLAS

SEQ ID NO: 429 - protein, 9 aa, Artificial Sequence
  PSCA-4 LCDR3
QQWSSSPFT

SEQ ID NO: 430 - protein, 112 aa, Artificial Sequence
  PSCA-4 H
EVQLQQSGAELVRSGASVKLSCTASGFNIKDYYIHWVNQRPDQGLEWIGWIDPENGDTEFVPKFQGKATMTADIFSNTAYLHLSSLTSEDTAVYYCKTGGFWGQGTLVTVSS

SEQ ID NO: 431 - DNA, 336 bp, Artificial Sequence
  PSCA-4 H
gaagtgcagctgcagcagtctggagccgagctggtcagatctggagccagcgtgaagctgtcttgcaccgccagcggcttcaacatcaaggactactacatccactgggtgaaccagaggcccgaccagggcctggaatggatcggctggatcgaccccgagaacggcgacaccgagttcgtgcccaagttccagggcaaggccaccatgaccgccgacatcttcagcaacaccgcctacctgcacctgagcagcctgacctctgaggacaccgccgtgtactactgcaagaccggcggcttctggggacagggcaccctggtcaccgtgtcctcc

SEQ ID NO: 432 - protein, 5 aa, Artificial Sequence
  PSCA-4 HCDR1
DYYIH

SEQ ID NO: 433 - protein, 17 aa, Artificial Sequence
  PSCA-4 HCDR2
WIDPENGDTEFVPKFQG

SEQ ID NO: 434 - protein, 3 aa, Artificial Sequence
  PSCA-4 HCDR3
GGF

SEQ ID NO: 435 - protein, 233 aa, Artificial Sequence
  PSCA-4 HL
EVQLQQSGAELVRSGASVKLSCTASGFNIKDYYIHWVNQRPDQGLEWIGWIDPENGDTEFVPKFQGKATMTADIFSNTAYLHLSSLTSEDTAVYYCKTGGFWGQGTLVTVSSGGGGSGGGGSGGGGSQVVLTQSPAIMSASPGEKVTMACSASSSVRFIHWYQQKSGTSPKRWIYDTSKLASGVPTRFSGSGSGTSYSLTISTMEAEDAATYYCQQWSSSPFTFGSGTKLIIK

SEQ ID NO: 436 - DNA, 699 bp, Artificial Sequence
  PSCA-4 HL
gaagtgcagctgcagcagtctggagccgagctggtcagatctggagccagcgtgaagctgtcttgcaccgccagcggcttcaacatcaaggactactacatccactgggtgaaccagaggcccgaccagggcctggaatggatcggctggatcgaccccgagaacggcgacaccgagttcgtgcccaagttccagggcaaggccaccatgaccgccgacatcttcagcaacaccgcctacctgcacctgagcagcctgacctctgaggacaccgccgtgtactactgcaagaccggcggcttctggggacagggcaccctggtcaccgtgtcctccggtggtggtggttctggcggcggcggctccggtggtggtggttctcaggtggtgctgacccagagcccagccatcatgagcgccagcccaggcgagaaagtgaccatggcctgcagcgccagcagcagcgtgcggttcatccactggtatcagcagaagtccggcaccagccccaagagatggatctacgacaccagcaagctggctagcggcgtgccaaccagattcagcggaagcggctccggcacctcctacagcctgaccatcagcaccatggaagccgaggacgccgccacctactactgccagcagtggagcagcagccccttcaccttcggcagcggcaccaagctgatcatcaag

SEQ ID NO: 437 - protein, 233 aa, Artificial Sequence
  PSCA-4 LH
QVVLTQSPAIMSASPGEKVTMACSASSSVRFIHWYQQKSGTSPKRWIYDTSKLASGVPTRFSGSGSGTSYSLTISTMEAEDAATYYCQQWSSSPFTFGSGTKLIIKGGGGSGGGGSGGGGSEVQLQQSGAELVRSGASVKLSCTASGFNIKDYYIHWVNQRPDQGLEWIGWIDPENGDTEFVPKFQGKATMTADIFSNTAYLHLSSLTSEDTAVYYCKTGGFWGQGTLVTVSS

SEQ ID NO: 438 - DNA, 699 bp, Artificial Sequence
  PSCA-4 LH
caggtggtgctgacccagagcccagccatcatgagcgccagcccaggcgagaaagtgaccatggcctgcagcgccagcagcagcgtgcggttcatccactggtatcagcagaagtccggcaccagccccaagagatggatctacgacaccagcaagctggctagcggcgtgccaaccagattcagcggaagcggctccggcacctcctacagcctgaccatcagcaccatggaagccgaggacgccgccacctactactgccagcagtggagcagcagccccttcaccttcggcagcggcaccaagctgatcatcaagggtggtggtggttctggcggcggcggctccggtggtggtggttctgaagtgcagctgcagcagtctggagccgagctggtcagatctggagccagcgtgaagctgtcttgcaccgccagcggcttcaacatcaaggactactacatccactgggtgaaccagaggcccgaccagggcctggaatggatcggctggatcgaccccgagaacggcgacaccgagttcgtgcccaagttccagggcaaggccaccatgaccgccgacatcttcagcaacaccgcctacctgcacctgagcagcctgacctctgaggacaccgccgtgtactactgcaagaccggcggcttctggggacagggcaccctggtcaccgtgtcctcc

SEQ ID NO: 439 - protein, 488 aa, Artificial Sequence
  PSCA-4 HL x I2C HL
EVQLQQSGAELVRSGASVKLSCTASGFNIKDYYIHWVNQRPDQGLEWIGWIDPENGDTEFVPKFQGKATMTADIFSNTAYLHLSSLTSEDTAVYYCKTGGFWGQGTLVTVSSGGGGSGGGGSGGGGSQVVLTQSPAIMSASPGEKVTMACSASSSVRFIHWYQQKSGTSPKRWIYDTSKLASGVPTRFSGSGSGTSYSLTISTMEAEDAATYYCQQWSSSPFTFGSGTKLIIKSGGGGSEVQLVESGGGLVQPGGSLKLSCAASGFTFNKYAMNWVRQAPGKGLEWVARIRSKYNNYATYYADSVKDRFTISRDDSKNTAYLQMNNLKTEDTAVYYCVRHGNFGNSYISYWAYWGQGTLVTVSSGGGGSGGGGSGGGGSQTVVTQEPSLTVSPGGTVTLTCGSSTGAVTSGNYPNWVQQKPGQAPRGLIGGTKFLAPGTPARFSGSLLGGKAALTLSGVQPEDEAEYYCVLWYSNRWVFGGGTKLTVL

SEQ ID NO: 440 - DNA, 1464 bp, Artificial Sequence
  PSCA-4 HL x I2C HL
gaagtgcagctgcagcagtctggagccgagctggtcagatctggagccagcgtgaagctgtcttgcaccgccagcggcttcaacatcaaggactactacatccactgggtgaaccagaggcccgaccagggcctggaatggatcggctggatcgaccccgagaacggcgacaccgagttcgtgcccaagttccagggcaaggccaccatgaccgccgacatcttcagcaacaccgcctacctgcacctgagcagcctgacctctgaggacaccgccgtgtactactgcaagaccggcggcttctggggacagggcaccctggtcaccgtgtcctccggtggtggtggttctggcggcggcggctccggtggtggtggttctcaggtggtgctgacccagagcccagccatcatgagcgccagcccaggcgagaaagtgaccatggcctgcagcgccagcagcagcgtgcggttcatccactggtatcagcagaagtccggcaccagccccaagagatggatctacgacaccagcaagctggctagcggcgtgccaaccagattcagcggaagcggctccggcacctcctacagcctgaccatcagcaccatggaagccgaggacgccgccacctactactgccagcagtggagcagcagccccttcaccttcggcagcggcaccaagctgatcatcaagtccggaggtggtggatccgaggtgcagctggtcgagtctggaggaggattggtgcagcctggagggtcattgaaactctcatgtgcagcctctggattcaccttcaataagtacgccatgaactgggtccgccaggctccaggaaagggtttggaatgggttgctcgcataagaagtaaatataataattatgcaacatattatgccgattcagtgaaagacaggttcaccatctccagagatgattcaaaaaacactgcctatctacaaatgaacaacttgaaaactgaggacactgccgtgtactactgtgtgagacatgggaacttcggtaatagctacatatcctactgggcttactggggccaagggactctggtcaccgtctcctcaggtggtggtggttctggcggcggcggctccggtggtggtggttctcagactgttgtgactcaggaaccttcactcaccgtatcacctggtggaacagtcacactcacttgtggctcctcgactggggctgttacatctggcaactacccaaactgggtccaacaaaaaccaggtcaggcaccccgtggtctaataggtgggactaagttcctcgcccccggtactcctgccagattctcaggctccctgcttggaggcaaggctgccctcaccctctcaggggtacagccagaggatgaggcagaatattactgtgttctatggtacagcaaccgctgggtgttcggtggaggaaccaaactgactgtccta

SEQ ID NO: 441 - protein, 487 aa, Artificial Sequence
  PSCA-4 LH x I2C HL
QVVLTQSPAIMSASPGEKVTMACSASSSVRFIHWYQQKSGTSPKRWIYDTSKLASGVPTRFSGSGSGTSYSLTISTMEAEDAATYYCQQWSSSPFTFGSGTKLIIKGGGGSGGGGSGGGGSEVQLQQSGAELVRSGASVKLSCTASGFNIKDYYIHWVNQRPDQGLEWIGWIDPENGDTEFVPKFQGKATMTADIFSNTAYLHLSSLTSEDTAVYYCKTGGFWGQGTLVTVSSGGGGSEVQLVESGGGLVQPGGSLKLSCAASGFTFNKYAMNWVRQAPGKGLEWVARIRSKYNNYATYYADSVKDRFTISRDDSKNTAYLQMNNLKTEDTAVYYCVRHGNFGNSYISYWAYWGQGTLVTVSSGGGGSGGGGSGGGGSQTVVTQEPSLTVSPGGTVTLTCGSSTGAVTSGNYPNWVQQKPGQAPRGLIGGTKFLAPGTPARFSGSLLGGKAALTLSGVQPEDEAEYYCVLWYSNRWVFGGGTKLTVL

SEQ ID NO: 442 - DNA, 1461 bp, Artificial Sequence
  PSCA-4 LH x I2C HL
caggtggtgctgacccagagcccagccatcatgagcgccagcccaggcgagaaagtgaccatggcctgcagcgccagcagcagcgtgcggttcatccactggtatcagcagaagtccggcaccagccccaagagatggatctacgacaccagcaagctggctagcggcgtgccaaccagattcagcggaagcggctccggcacctcctacagcctgaccatcagcaccatggaagccgaggacgccgccacctactactgccagcagtggagcagcagccccttcaccttcggcagcggcaccaagctgatcatcaagggtggtggtggttctggcggcggcggctccggtggtggtggttctgaagtgcagctgcagcagtctggagccgagctggtcagatctggagccagcgtgaagctgtcttgcaccgccagcggcttcaacatcaaggactactacatccactgggtgaaccagaggcccgaccagggcctggaatggatcggctggatcgaccccgagaacggcgacaccgagttcgtgcccaagttccagggcaaggccaccatgaccgccgacatcttcagcaacaccgcctacctgcacctgagcagcctgacctctgaggacaccgccgtgtactactgcaagaccggcggcttctggggacagggcaccctggtcaccgtgtcctccggaggtggtggatccgaggtgcagctggtcgagtctggaggaggattggtgcagcctggagggtcattgaaactctcatgtgcagcctctggattcaccttcaataagtacgccatgaactgggtccgccaggctccaggaaagggtttggaatgggttgctcgcataagaagtaaatataataattatgcaacatattatgccgattcagtgaaagacaggttcaccatctccagagatgattcaaaaaacactgcctatctacaaatgaacaacttgaaaactgaggacactgccgtgtactactgtgtgagacatgggaacttcggtaatagctacatatcctactgggcttactggggccaagggactctggtcaccgtctcctcaggtggtggtggttctggcggcggcggctccggtggtggtggttctcagactgttgtgactcaggaaccttcactcaccgtatcacctggtggaacagtcacactcacttgtggctcctcgactggggctgttacatctggcaactacccaaactgggtccaacaaaaaccaggtcaggcaccccgtggtctaataggtgggactaagttcctcgcccccggtactcctgccagattctcaggctccctgcttggaggcaaggctgccctcaccctctcaggggtacagccagaggatgaggcagaatattactgtgttctatggtacagcaaccgctgggtgttcggtggaggaaccaaactgactgtccta

SEQ ID NO: 443 - protein, 130 aa, Homo sapiens
MGWSCIILFLVATATGVHSDYKDDDDKLLCYSCKAQVSNEDCLQVENCTQLGEQCWTARIRAVGLLTVISKGCSLNCVDDSQDYYVGKKNITCCDTDLCNASGAHALQPAAAILALLPALGLLLWGPGQL

SEQ ID NO: 444 - DNA, 393 bp, Homo sapiens
atgggatggagctgtatcatcctcttcttggtagcaacagctacaggtgtacactccgattacaaggacgacgatgacaagctgctgtgctactcctgcaaagcccaggtgagcaacgaggactgcctgcaggtggagaactgcacccagctgggggagcagtgctggaccgcgcgcatccgcgcagttggcctcctgaccgtcatcagcaaaggctgcagcttgaactgcgtggatgactcacaggactactacgtgggcaagaagaacatcacgtgctgtgacaccgacttgtgcaacgccagcggggcccatgccctgcagccggctgctgccatccttgcgctgctccctgcactcggcctgctgctctggggacccggccagctctag

SEQ ID NO: 445 - protein, 130 aa, Macaca fascicularis
MGWSCIILFLVATATGVHSDYKDDDDKLLCYSCKAQVSNEDCLNVENCTQPEEQCWTERIRAVGLLTVISKGCSSNCVDDSQDYYVGKKNITCCDTDLCNASGAHALQPAAAILALLPALSLLLWGPRQL

SEQ ID NO: 446 - DNA, 393 bp, Macaca fascicularis
atgggatggagctgtatcatcctcttcttggtagcaacagctacaggtgtacactccgattacaaggacgacgatgacaagctgctgtgctactcctgcaaggcccaggtgagcaacgaggactgcctgaatgtggagaactgcacgcagccggaggagcagtgctggaccgagcgcatccgcgccgtgggcctcctgaccgtcatcagcaaaggctgcagctcaaactgcgtggatgactcacaggactactacgtgggcaagaagaacatcacctgctgtgacaccgacctgtgcaacgccagcggggcccatgcactgcagccggctgctgccatcctggcactgctccctgcactcagcctgctgctttggggccccagacagctgtag

SEQ ID NO: 447 - DNA, 21 bp, Artificial Sequence
  forward primer
caccacagcccaccagtgacc

SEQ ID NO: 448 - DNA, 21 bp, Artificial Sequence
  reverse primer
gaggcctggggcaccacaccc

SEQ ID NO: 449 - DNA, 54 bp, Artificial Sequence
  P3-VH-A-XhoI
cctgatctcgagagcggcscagasstgraaaagccaggcgccacggtgaagatt

SEQ ID NO: 450 - DNA, 69 bp, Artificial Sequence
  P3-VH-B
ggcgccacggtgaagatttcctgcaagsycagcggcwacacgttcaccggctactacatccactgggtg

SEQ ID NO: 451 - DNA, 87 bp, Artificial Sequence
  P3-VH-C
gtaggaggtgaagccgttgttggggtccactctgccsatccattccaggcycttcccgkgggmctgttkcacccagtggatgtagta

SEQ ID NO: 452 - DNA, 87 bp, Artificial Sequence
  P3-VH-D
aacggcttcacctcctacaaccagaagttcaagggcarggycayamtkaccgyggacamgagcaccrrcaccgcctacatggaactg

SEQ ID NO: 453 - DNA, 78 bp, Artificial Sequence
  P3-VH-E
gctgtcgaagaagttgcccrcgcaatagtacacggcggtgtcctcgctgskcaggctkctcagttccatgtaggcggt

SEQ ID NO: 454 - DNA, 48 bp, Artificial Sequence
  P3-VH-F-BstEII
cacgtcggtgaccgtggttccctggccccagctgtcgaagaagttgcc

SEQ ID NO: 455 - DNA, 87 bp, Artificial Sequence
  PSCA2VH-A-XHO1
caggtgctcgagycaggcgccgaastgrwgaagcctggcgccmcagtgaagmtatcctgcaaggycagcggctacaccttcaccaac

SEQ ID NO: 456 - DNA, 93 bp, Artificial Sequence
  PSCA2VH-B
gctgtcgctggggtcgatcctgccyatccattccaggcccytgccgggcsyctgttkcacccagttcagccagtagttggtgaaggtgtagcc

SEQ ID NO: 457 - DNA, 93 bp, Artificial Sequence
  PSCA2VH-C
aggatcgaccccagcgacagcgagatccactacgaccagaagttcaaggacaragycaccmtaaccgyggacamgagcaccrrcaccgcctac

SEQ ID NO: 458 - DNA, 76 bp, Artificial Sequence
  PSCA2VH-D
ggccagggcgcaatagtacacggcggtgtcctcgcttstcaggctggacagctssatgtaggcggtgyyggtgctc

SEQ ID NO: 459 - DNA, 72 bp, Artificial Sequence
  PSCA2VH-E-BSTE2
agacacggtgaccgtggtgccctggccccagtaggccatggcgtagatgccggtcagggcgcaatagtacac

SEQ ID NO: 460 - DNA, 69 bp, Artificial Sequence
  P3-VL-A-SacI
cctgtagagctcgtcatgacccagtcccccctgtccctgmscgtgaccmtcggccagccagccagcatc

SEQ ID NO: 461 - DNA, 75 bp, Artificial Sequence
  P3-VL-B
ccagttcaggtaggtcttgccgtcgctgtccagcagggactggctggacttgcaagagatgctggctggctggcc

SEQ ID NO: 462 - DNA, 75 bp, Artificial Sequence
  P3-VL-C
aagacctacctgaactggytscwgcagaggccaggccagagccccargaggctgatctacctggtgtccaccctg

SEQ ID NO: 463 - DNA, 72 bp, Artificial Sequence
  P3-VL-D
ggtgaagtcggtgccggagccgctgccggagaatctgtctggcacgccgctgtccagggtggacaccaggta

SEQ ID NO: 464 - DNA, 78 bp, Artificial Sequence
  P3-VL-E
tccggcaccgacttcaccctgaagatcagcagggtggaggccgaggacstgggcgtgtactactgctggcagggcacc

SEQ ID NO: 465 - DNA, 81 bp, Artificial Sequence
  P3-VL-F-BsiWI/SpeI
ccagacactagtcgtacgcttgatttccagcttggtccctccgccgaaggtccttgggaagtgggtgccctgccagcagta

SEQ ID NO: 466 - DNA, 84 bp, Artificial Sequence
  PSCA2VL-a-SAC1
cagacagagctcgtgatgacccagkcasctcyaagcstgccagtgaccccaggcgagycagygtccatcagctgcaggtccagc

SEQ ID NO: 467 - DNA, 91 bp, Artificial Sequence
  PSCA2VL-b
ctgggggctctggcctggcytctgcagawaccagtacaggtaggtgttgccgttgctgtgcagcaggctcttgctggacctgcagctgatg

SEQ ID NO: 468 - DNA, 90 bp, Artificial Sequence
  PSCA2VL-c
ccaggccagagcccccagctgctgatctacaggatgagcaacctggctagcggcgtgccagacagattcagcggcagcggctctggaacc

SEQ ID NO: 469 - DNA, 78 bp, Artificial Sequence
  PSCA2VL-d
caggcagtagtacacgcccacgtcctcggcctccaccctgctgatcytcagggtgaagkcggttccagagccgctgcc

SEQ ID NO: 470 - DNA, 90 bp, Artificial Sequence
  PSCA2VL-e-BsiW1-Spe1
gtgctgactagtcgtacgcttgatttccagcttggtcccttggccgaaggtgtaggggtattccaggtgctgcaggcagtagtacacgcc

SEQ ID NO: 471 - protein, 111 aa, Artificial Sequence
  HD37 L
DIQLTQSPASLAVSLGQRATISCKASQSVDYDGDSYLNWYQQIPGQPPKLLIYDASNLVSGIPPRFSGSGSGTDFTLNIHPVEKVDAATYHCQQSTEDPWTFGGGTKLEIK

SEQ ID NO: 472 - DNA, 333 bp, Artificial Sequence
  HD37 L
gatatccagctgacccagtctccagcttctttggctgtgtctctagggcagagggccaccatctcctgcaaggccagccaaagtgttgattatgatggtgatagttatttgaactggtaccaacagattccaggacagccacccaaactcctcatctatgatgcatccaatctagtttctgggatcccacccaggtttagtggcagtgggtctgggacagacttcaccctcaacatccatcctgtggagaaggtggatgctgcaacctatcactgtcagcaaagtactgaggatccgtggacgttcggtggagggaccaagctcgagatcaaa

SEQ ID NO: 473 - protein, 15 aa, Artificial Sequence
  HD37 LCDR1
KASQSVDYDGDSYLN

SEQ ID NO: 474 - protein, 7 aa, Artificial Sequence
  HD37 LCDR2
DASNLVS

SEQ ID NO: 475 - protein, 9 aa, Artificial Sequence
  HD37 LCDR3
QQSTEDPWT

SEQ ID NO: 476 - protein, 124 aa, Artificial Sequence
  HD37 H
QVQLQQSGAELVRPGSSVKISCKASGYAFSSYWMNWVKQRPGQGLEWIGQIWPGDGDTNYNGKFKGKATLTADESSSTAYMQLSSLASEDSAVYFCARRETTTVGRYYYAMDYWGQGTTVTVSS

SEQ ID NO: 477 - DNA, 372 bp, Artificial Sequence
  HD37 H
caggtgcagctgcagcagtctggggctgagctggtgaggcctgggtcctcagtgaagatttcctgcaaggcttctggctatgcattcagtagctactggatgaactgggtgaagcagaggcctggacagggtcttgagtggattggacagatttggcctggagatggtgatactaactacaatggaaagttcaagggtaaagccactctgactgcagacgaatcctccagcacagcctacatgcaactcagcagcctagcatctgaggactctgcggtctatttctgtgcaagacgggagactacgacggtaggccgttattactatgctatggactactggggccaagggaccacggtcaccgtctcctcc

SEQ ID NO: 478 - protein, 5 aa, Artificial Sequence
  HD37 HCDR1
SYWMN

SEQ ID NO: 479 - protein, 17 aa, Artificial Sequence
  HD37 HCDR2
QIWPGDGDTNYNGKFKG

SEQ ID NO: 480 - protein, 15 aa, Artificial Sequence
  HD37 HCDR3
RETTTVGRYYYAMDY

SEQ ID NO: 481 - protein, 504 aa, Artificial Sequence
  HD37 LH x I2C HL
DIQLTQSPASLAVSLGQRATISCKASQSVDYDGDSYLNWYQQIPGQPPKLLIYDASNLVSGIPPRFSGSGSGTDFTLNIHPVEKVDAATYHCQQSTEDPWTFGGGTKLEIKGGGGSGGGGSGGGGSQVQLQQSGAELVRPGSSVKISCKASGYAFSSYWMNWVKQRPGQGLEWIGQIWPGDGDTNYNGKFKGKATLTADESSSTAYMQLSSLASEDSAVYFCARRETTTVGRYYYAMDYWGQGTTVTVSSGGGGSEVQLVESGGGLVQPGGSLKLSCAASGFTFNKYAMNWVRQAPGKGLEWVARIRSKYNNYATYYADSVKDRFTISRDDSKNTAYLQMNNLKTEDTAVYYCVRHGNFGNSYISYWAYWGQGTLVTVSSGGGGSGGGGSGGGGSQTVVTQEPSLTVSPGGTVTLTCGSSTGAVTSGNYPNWVQQKPGQAPRGLIGGTKFLAPGTPARFSGSLLGGKAALTLSGVQPEDEAEYYCVLWYSNRWVFGGGTKLTVL

SEQ ID NO: 482 - DNA, 1512 bp, Artificial Sequence
  HD37 LH x I2C HL
gatatccagctgacccagtctccagcttctttggctgtgtctctagggcagagggccaccatctcctgcaaggccagccaaagtgttgattatgatggtgatagttatttgaactggtaccaacagattccaggacagccacccaaactcctcatctatgatgcatccaatctagtttctgggatcccacccaggtttagtggcagtgggtctgggacagacttcaccctcaacatccatcctgtggagaaggtggatgctgcaacctatcactgtcagcaaagtactgaggatccgtggacgttcggtggagggaccaagctcgagatcaaaggtggtggtggttctggcggcggcggctccggtggtggtggttctcaggtgcagctgcagcagtctggggctgagctggtgaggcctgggtcctcagtgaagatttcctgcaaggcttctggctatgcattcagtagctactggatgaactgggtgaagcagaggcctggacagggtcttgagtggattggacagatttggcctggagatggtgatactaactacaatggaaagttcaagggtaaagccactctgactgcagacgaatcctccagcacagcctacatgcaactcagcagcctagcatctgaggactctgcggtctatttctgtgcaagacgggagactacgacggtaggccgttattactatgctatggactactggggccaagggaccacggtcaccgtctcctccggaggtggtggatccgaggtgcagctggtcgagtctggaggaggattggtgcagcctggagggtcattgaaactctcatgtgcagcctctggattcaccttcaataagtacgccatgaactgggtccgccaggctccaggaaagggtttggaatgggttgctcgcataagaagtaaatataataattatgcaacatattatgccgattcagtgaaagacaggttcaccatctccagagatgattcaaaaaacactgcctatctacaaatgaacaacttgaaaactgaggacactgccgtgtactactgtgtgagacatgggaacttcggtaatagctacatatcctactgggcttactggggccaagggactctggtcaccgtctcctcaggtggtggtggttctggcggcggcggctccggtggtggtggttctcagactgttgtgactcaggaaccttcactcaccgtatcacctggtggaacagtcacactcacttgtggctcctcgactggggctgttacatctggcaactacccaaactgggtccaacaaaaaccaggtcaggcaccccgtggtctaataggtgggactaagttcctcgcccccggtactcctgccagattctcaggctccctgcttggaggcaaggctgccctcaccctctcaggggtacagccagaggatgaggcagaatattactgtgttctatggtacagcaaccgctgggtgttcggtggaggaaccaaactgactgtccta

SEQ ID NO: 483 - protein, 504 aa, Artificial Sequence
  HD37  LH x H2C HL
DIQLTQSPASLAVSLGQRATISCKASQSVDYDGDSYLNWYQQIPGQPPKLLIYDASNLVSGIPPRFSGSGSGTDFTLNIHPVEKVDAATYHCQQSTEDPWTFGGGTKLEIKGGGGSGGGGSGGGGSQVQLQQSGAELVRPGSSVKISCKASGYAFSSYWMNWVKQRPGQGLEWIGQIWPGDGDTNYNGKFKGKATLTADESSSTAYMQLSSLASEDSAVYFCARRETTTVGRYYYAMDYWGQGTTVTVSSGGGGSEVQLVESGGGLVQPGGSLKLSCAASGFTFNKYAMNWVRQAPGKGLEWVARIRSKYNNYATYYADSVKDRFTISRDDSKNTAYLQMNNLKTEDTAVYYCVRHGNFGNSYISYWAYWGQGTLVTVSSGGGGSGGGGSGGGGSQTVVTQEPSLTVSPGGTVTLTCGSSTGAVTSGYYPNWVQQKPGQAPRGLIGGTKFLAPGTPARFSGSLLGGKAALTLSGVQPEDEAEYYCALWYSNRWVFGGGTKLTVL

SEQ ID NO: 484 - DNA, 1512 bp, Artificial Sequence
  HD37  LH x H2C HL
gatatccagctgacccagtctccagcttctttggctgtgtctctagggcagagggccaccatctcctgcaaggccagccaaagtgttgattatgatggtgatagttatttgaactggtaccaacagattccaggacagccacccaaactcctcatctatgatgcatccaatctagtttctgggatcccacccaggtttagtggcagtgggtctgggacagacttcaccctcaacatccatcctgtggagaaggtggatgctgcaacctatcactgtcagcaaagtactgaggatccgtggacgttcggtggagggaccaagctcgagatcaaaggtggtggtggttctggcggcggcggctccggtggtggtggttctcaggtgcagctgcagcagtctggggctgagctggtgaggcctgggtcctcagtgaagatttcctgcaaggcttctggctatgcattcagtagctactggatgaactgggtgaagcagaggcctggacagggtcttgagtggattggacagatttggcctggagatggtgatactaactacaatggaaagttcaagggtaaagccactctgactgcagacgaatcctccagcacagcctacatgcaactcagcagcctagcatctgaggactctgcggtctatttctgtgcaagacgggagactacgacggtaggccgttattactatgctatggactactggggccaagggaccacggtcaccgtctcctccggaggtggtggatccgaggtgcagctggtcgagtctggaggaggattggtgcagcctggagggtcattgaaactctcatgtgcagcctctggattcaccttcaataagtacgccatgaactgggtccgccaggctccaggaaagggtttggaatgggttgctcgcataagaagtaaatataataattatgcaacatattatgccgattcagtgaaagacaggttcaccatctccagagatgattcaaaaaacactgcctatctacaaatgaacaacttgaaaactgaggacactgccgtgtactactgtgtgagacatgggaacttcggtaatagctacatatcctactgggcttactggggccaagggactctggtcaccgtctcctcaggtggtggtggttctggcggcggcggctccggtggtggtggttctcagactgttgtgactcaggaaccttcactcaccgtatcacctggtggaacagtcacactcacttgtggctcctcgactggggctgttacatctggctactacccaaactgggtccaacaaaaaccaggtcaggcaccccgtggtctaataggtgggactaagttcctcgcccccggtactcctgccagattctcaggctccctgcttggaggcaaggctgccctcaccctctcaggggtacagccagaggatgaggcagaatattactgtgctctatggtacagcaaccgctgggtgttcggtggaggaaccaaactgactgtccta

SEQ ID NO: 485 - protein, 504 aa, Artificial Sequence
  HD37  LH x F12Q HL
DIQLTQSPASLAVSLGQRATISCKASQSVDYDGDSYLNWYQQIPGQPPKLLIYDASNLVSGIPPRFSGSGSGTDFTLNIHPVEKVDAATYHCQQSTEDPWTFGGGTKLEIKGGGGSGGGGSGGGGSQVQLQQSGAELVRPGSSVKISCKASGYAFSSYWMNWVKQRPGQGLEWIGQIWPGDGDTNYNGKFKGKATLTADESSSTAYMQLSSLASEDSAVYFCARRETTTVGRYYYAMDYWGQGTTVTVSSGGGGSEVQLVESGGGLVQPGGSLKLSCAASGFTFNSYAMNWVRQAPGKGLEWVARIRSKYNNYATYYADSVKGRFTISRDDSKNTAYLQMNNLKTEDTAVYYCVRHGNFGNSYVSWWAYWGQGTLVTVSSGGGGSGGGGSGGGGSQTVVTQEPSLTVSPGGTVTLTCGSSTGAVTSGNYPNWVQQKPGQAPRGLIGGTKFLAPGTPARFSGSLLGGKAALTLSGVQPEDEAEYYCVLWYSNRWVFGGGTKLTVL

SEQ ID NO: 486 - DNA, 1512 bp, Artificial Sequence
  HD37  LH x F12Q HL
gatatccagctgacccagtctccagcttctttggctgtgtctctagggcagagggccaccatctcctgcaaggccagccaaagtgttgattatgatggtgatagttatttgaactggtaccaacagattccaggacagccacccaaactcctcatctatgatgcatccaatctagtttctgggatcccacccaggtttagtggcagtgggtctgggacagacttcaccctcaacatccatcctgtggagaaggtggatgctgcaacctatcactgtcagcaaagtactgaggatccgtggacgttcggtggagggaccaagctcgagatcaaaggtggtggtggttctggcggcggcggctccggtggtggtggttctcaggtgcagctgcagcagtctggggctgagctggtgaggcctgggtcctcagtgaagatttcctgcaaggcttctggctatgcattcagtagctactggatgaactgggtgaagcagaggcctggacagggtcttgagtggattggacagatttggcctggagatggtgatactaactacaatggaaagttcaagggtaaagccactctgactgcagacgaatcctccagcacagcctacatgcaactcagcagcctagcatctgaggactctgcggtctatttctgtgcaagacgggagactacgacggtaggccgttattactatgctatggactactggggccaagggaccacggtcaccgtctcctccggaggtggtggatccgaggtgcagctggtcgagtctggaggaggattggtgcagcctggagggtcattgaaactctcatgtgcagcctctggattcaccttcaatagctacgccatgaactgggtccgccaggctccaggaaagggtttggaatgggttgctcgcataagaagtaaatataataattatgcaacatattatgccgattcagtgaaaggcaggttcaccatctccagagatgattcaaaaaacactgcctatctacaaatgaacaacttgaaaactgaggacactgccgtgtactactgtgtgagacatgggaacttcggtaatagctacgtttcctggtgggcttactggggccaagggactctggtcaccgtctcctcaggtggtggtggttctggcggcggcggctccggtggtggtggttctcagactgttgtgactcaggaaccttcactcaccgtatcacctggtggaacagtcacactcacttgtggctcctcgactggggctgttacatctggcaactacccaaactgggtccaacaaaaaccaggtcaggcaccccgtggtctaataggtgggactaagttcctcgcccccggtactcctgccagattctcaggctccctgcttggaggcaaggctgccctcaccctctcaggggtacagccagaggatgaggcagaatattactgtgttctatggtacagcaaccgctgggtgttcggtggaggaaccaaactgactgtccta

SEQ ID NO: 487 - protein, 111 aa, Artificial Sequence
  hCD19 26-D6 L
DIQMTQSPASLSASLGDRVTITCKASQSVDYDGDSYLNWYQQKPGKAPKLLIYDASNLVSGIPSRFSGSGSGTDFTLTISSLQQVDFATYYCQQSTEDPWTFGQGTKVEIK

SEQ ID NO: 488 - DNA, 333 bp, Artificial Sequence
  hCD19 26-D6 L
gacatccagatgacccagtctccagcttctttgtctgcgtctctaggggacagagtcaccatcacctgcaaggccagccaaagtgttgattatgatggtgatagttatttgaactggtaccaacagaaaccaggaaaggcacccaaactcctcatctatgatgcatccaatctagtttctgggatcccatccaggtttagtggcagtgggtctgggacagacttcaccctcaccatcagttctctgcagcaggtggatttcgcaacctattactgtcagcaaagtactgaggatccgtggacgttcggtcaagggaccaaggtggagatcaaa

SEQ ID NO: 489 - protein, 15 aa, Artificial Sequence
  hCD19 26-D6 LCDR1
KASQSVDYDGDSYLN

SEQ ID NO: 490 - protein, 7 aa, Artificial Sequence
  hCD19 26-D6 LCDR2
DASNLVS

SEQ ID NO: 491 - protein, 9 aa, Artificial Sequence
  hCD19 26-D6 LCDR3
QQSTEDPWT

SEQ ID NO: 492 - protein, 124 aa, Artificial Sequence
  hCD19 26-D6 H
QVQLVQSGAEVKKPGASVKVSCKASGYTFTSYWMNWVKQGPGQGLEWMGQIWPGDGDTNYNGKFKGRVTMTADASTSTVYMELSSLRSEDTAVYFCARRETTTVGRYYYAMDYWGQGTTVTVSS

SEQ ID NO: 493 - DNA, 372 bp, Artificial Sequence
  hCD19 26-D6 H
caggtgcagctggtccagtctggggctgaggtgaagaagcctggggcctcagtgaaggtttcctgcaaggcttctggctatacattcactagctactggatgaactgggtgaagcagggccctggacagggtcttgagtggatgggacagatttggcctggagatggtgatactaactacaatggaaagttcaagggtagagtcactatgactgctgacgcatccaccagcacagtctacatggaactcagcagcctgcgatctgaggacactgcggtctatttctgtgcaagacgggagactacgacggtaggccgttattactatgctatggactactggggccaagggaccacggtcaccgtctcctcc

SEQ ID NO: 494 - protein, 5 aa, Artificial Sequence
  hCD19 26-D6 HCDR1
SYWMN

SEQ ID NO: 495 - protein, 17 aa, Artificial Sequence
  hCD19 26-D6 HCDR2
QIWPGDGDTNYNGKFKG

SEQ ID NO: 496 - protein, 15 aa, Artificial Sequence
  hCD19 26-D6 HCDR3
RETTTVGRYYYAMDY

SEQ ID NO: 497 - protein, 504 aa, Artificial Sequence
  hCD19 26-D6 LH x I2C HL
DIQMTQSPASLSASLGDRVTITCKASQSVDYDGDSYLNWYQQKPGKAPKLLIYDASNLVSGIPSRFSGSGSGTDFTLTISSLQQVDFATYYCQQSTEDPWTFGQGTKVEIKGGGGSGGGGSGGGGSQVQLVQSGAEVKKPGASVKVSCKASGYTFTSYWMNWVKQGPGQGLEWMGQIWPGDGDTNYNGKFKGRVTMTADASTSTVYMELSSLRSEDTAVYFCARRETTTVGRYYYAMDYWGQGTTVTVSSGGGGSEVQLVESGGGLVQPGGSLKLSCAASGFTFNKYAMNWVRQAPGKGLEWVARIRSKYNNYATYYADSVKDRFTISRDDSKNTAYLQMNNLKTEDTAVYYCVRHGNFGNSYISYWAYWGQGTLVTVSSGGGGSGGGGSGGGGSQTVVTQEPSLTVSPGGTVTLTCGSSTGAVTSGNYPNWVQQKPGQAPRGLIGGTKFLAPGTPARFSGSLLGGKAALTLSGVQPEDEAEYYCVLWYSNRWVFGGGTKLTVL

SEQ ID NO: 498 - DNA, 1512 bp, Artificial Sequence
  hCD19 26-D6 LH x I2C HL
gacatccagatgacccagtctccagcttctttgtctgcgtctctaggggacagagtcaccatcacctgcaaggccagccaaagtgttgattatgatggtgatagttatttgaactggtaccaacagaaaccaggaaaggcacccaaactcctcatctatgatgcatccaatctagtttctgggatcccatccaggtttagtggcagtgggtctgggacagacttcaccctcaccatcagttctctgcagcaggtggatttcgcaacctattactgtcagcaaagtactgaggatccgtggacgttcggtcaagggaccaaggtggagatcaaaggtggtggtggttctggcggcggcggctccggtggtggtggttctcaggtgcagctggtccagtctggggctgaggtgaagaagcctggggcctcagtgaaggtttcctgcaaggcttctggctatacattcactagctactggatgaactgggtgaagcagggccctggacagggtcttgagtggatgggacagatttggcctggagatggtgatactaactacaatggaaagttcaagggtagagtcactatgactgctgacgcatccaccagcacagtctacatggaactcagcagcctgcgatctgaggacactgcggtctatttctgtgcaagacgggagactacgacggtaggccgttattactatgctatggactactggggccaagggaccacggtcaccgtctcctccggaggtggtggatccgaggtgcagctggtcgagtctggaggaggattggtgcagcctggagggtcattgaaactctcatgtgcagcctctggattcaccttcaataagtacgccatgaactgggtccgccaggctccaggaaagggtttggaatgggttgctcgcataagaagtaaatataataattatgcaacatattatgccgattcagtgaaagacaggttcaccatctccagagatgattcaaaaaacactgcctatctacaaatgaacaacttgaaaactgaggacactgccgtgtactactgtgtgagacatgggaacttcggtaatagctacatatcctactgggcttactggggccaagggactctggtcaccgtctcctcaggtggtggtggttctggcggcggcggctccggtggtggtggttctcagactgttgtgactcaggaaccttcactcaccgtatcacctggtggaacagtcacactcacttgtggctcctcgactggggctgttacatctggcaactacccaaactgggtccaacaaaaaccaggtcaggcaccccgtggtctaataggtgggactaagttcctcgcccccggtactcctgccagattctcaggctccctgcttggaggcaaggctgccctcaccctctcaggggtacagccagaggatgaggcagaatattactgtgttctatggtacagcaaccgctgggtgttcggtggaggaaccaaactgactgtccta

SEQ ID NO: 499 - protein, 111 aa, Artificial Sequence
  hCD19 45-A10 L
DIQMTQSPASLSVSVGERVTITCKASQSVDYDGDSYLNWYQQKPGKAPKLLIYDASNLVSGVPPRFSGSGSGTDFTLTISSVQPEDFATYYCQQSTEDPWTFGQGTKVEIK

SEQ ID NO: 500 - DNA, 333 bp, Artificial Sequence
  hCD19 45-A10 L
gacatccagatgacccagtctccagcttctttgtctgtgtctgtaggggagagagtcaccatcacctgcaaggccagccaaagtgttgattatgatggtgatagttatttgaactggtaccaacagaaaccaggaaaggcacccaaactcctcatctatgatgcatccaatctagtttctggggtcccacccaggtttagtggcagtgggtctgggacagacttcaccctcaccatcagttctgtgcagccggaggatttcgcaacctattactgtcagcaaagtactgaggatccgtggacgttcggtcaagggaccaaggtggagatcaaa

SEQ ID NO: 501 - protein, 15 aa, Artificial Sequence
  hCD19 45-A10 LCDR1
KASQSVDYDGDSYLN

SEQ ID NO: 502 - protein, 7 aa, Artificial Sequence
  hCD19 45-A10 LCDR2
DASNLVS

SEQ ID NO: 503 - protein, 9 aa, Artificial Sequence
  hCD19 45-A10 LCDR3
QQSTEDPWT

SEQ ID NO: 504 - protein, 124 aa, Artificial Sequence
  hCD19 45-A10 H
QVQLVQSGAELKKPGSSVKISCKASGYSFTSYWMNWVKQAPGQGLEWMGQIWPGDGDTNYNGKFKGKATMTADPSTSTAYMELSSLGSEDTAVYYCARRETTTVGRYYYAMDYWGQGTTVTVSS

SEQ ID NO: 505 - DNA, 372 bp, Artificial Sequence
  hCD19 45-A10 H
caggtgcagctggtccagtctggggctgagctgaagaagcctgggtcctcagtgaagatttcctgcaaggcttctggctattcattcactagctactggatgaactgggtgaagcaggcccctggacagggtcttgagtggatgggacagatttggcctggagatggtgatactaactacaatggaaagttcaagggtaaagccactatgactgctgacccatccaccagcacagcctacatggaactcagcagcctgggatctgaggacactgcggtctattactgtgcaagacgggagactacgacggtaggccgttattactatgctatggactactggggccaagggaccacggtcaccgtctcctcc

SEQ ID NO: 506 - protein, 5 aa, Artificial Sequence
  hCD19 45-A10 HCDR1
SYWMN

SEQ ID NO: 507 - protein, 17 aa, Artificial Sequence
  hCD19 45-A10 HCDR2
QIWPGDGDTNYNGKFKG

SEQ ID NO: 508 - protein, 15 aa, Artificial Sequence
  hCD19 45-A10 HCDR3
RETTTVGRYYYAMDY

SEQ ID NO: 509 - protein, 504 aa, Artificial Sequence
  hCD19 45-A10 LH x I2C HL
DIQMTQSPASLSVSVGERVTITCKASQSVDYDGDSYLNWYQQKPGKAPKLLIYDASNLVSGVPPRFSGSGSGTDFTLTISSVQPEDFATYYCQQSTEDPWTFGQGTKVEIKGGGGSGGGGSGGGGSQVQLVQSGAELKKPGSSVKISCKASGYSFTSYWMNWVKQAPGQGLEWMGQIWPGDGDTNYNGKFKGKATMTADPSTSTAYMELSSLGSEDTAVYYCARRETTTVGRYYYAMDYWGQGTTVTVSSGGGGSEVQLVESGGGLVQPGGSLKLSCAASGFTFNKYAMNWVRQAPGKGLEWVARIRSKYNNYATYYADSVKDRFTISRDDSKNTAYLQMNNLKTEDTAVYYCVRHGNFGNSYISYWAYWGQGTLVTVSSGGGGSGGGGSGGGGSQTVVTQEPSLTVSPGGTVTLTCGSSTGAVTSGNYPNWVQQKPGQAPRGLIGGTKFLAPGTPARFSGSLLGGKAALTLSGVQPEDEAEYYCVLWYSNRWVFGGGTKLTVL

SEQ ID NO: 510 - DNA, 1512 bp, Artificial Sequence
  hCD19 45-A10 LH x I2C HL
gacatccagatgacccagtctccagcttctttgtctgtgtctgtaggggagagagtcaccatcacctgcaaggccagccaaagtgttgattatgatggtgatagttatttgaactggtaccaacagaaaccaggaaaggcacccaaactcctcatctatgatgcatccaatctagtttctggggtcccacccaggtttagtggcagtgggtctgggacagacttcaccctcaccatcagttctgtgcagccggaggatttcgcaacctattactgtcagcaaagtactgaggatccgtggacgttcggtcaagggaccaaggtggagatcaaaggtggtggtggttctggcggcggcggctccggtggtggtggttctcaggtgcagctggtccagtctggggctgagctgaagaagcctgggtcctcagtgaagatttcctgcaaggcttctggctattcattcactagctactggatgaactgggtgaagcaggcccctggacagggtcttgagtggatgggacagatttggcctggagatggtgatactaactacaatggaaagttcaagggtaaagccactatgactgctgacccatccaccagcacagcctacatggaactcagcagcctgggatctgaggacactgcggtctattactgtgcaagacgggagactacgacggtaggccgttattactatgctatggactactggggccaagggaccacggtcaccgtctcctccggaggtggtggatccgaggtgcagctggtcgagtctggaggaggattggtgcagcctggagggtcattgaaactctcatgtgcagcctctggattcaccttcaataagtacgccatgaactgggtccgccaggctccaggaaagggtttggaatgggttgctcgcataagaagtaaatataataattatgcaacatattatgccgattcagtgaaagacaggttcaccatctccagagatgattcaaaaaacactgcctatctacaaatgaacaacttgaaaactgaggacactgccgtgtactactgtgtgagacatgggaacttcggtaatagctacatatcctactgggcttactggggccaagggactctggtcaccgtctcctcaggtggtggtggttctggcggcggcggctccggtggtggtggttctcagactgttgtgactcaggaaccttcactcaccgtatcacctggtggaacagtcacactcacttgtggctcctcgactggggctgttacatctggcaactacccaaactgggtccaacaaaaaccaggtcaggcaccccgtggtctaataggtgggactaagttcctcgcccccggtactcctgccagattctcaggctccctgcttggaggcaaggctgccctcaccctctcaggggtacagccagaggatgaggcagaatattactgtgttctatggtacagcaaccgctgggtgttcggtggaggaaccaaactgactgtccta

SEQ ID NO: 511 - protein, 111 aa, Artificial Sequence
  hCD19 46-B11 L
DIQMTQSPASLSASVGERVTITCKASQSVDYDGDSYLNWYQQIPGKPPKLLIYDASNLVSGIPSRFSGSGSGTDFTLTIHSLEQEDFATYYCQQSTEDPWTFGQGTKVEIK

SEQ ID NO: 512 - DNA, 333 bp, Artificial Sequence
  hCD19 46-B11 L
gacatccagatgacccagtctccagcttctttgtctgcgtctgtaggggaaagagtcaccatcacctgcaaggccagccaaagtgttgattatgatggtgatagttatttgaactggtaccaacagataccaggaaagccacccaaactcctcatctatgatgcatccaatctagtttctgggatcccatccaggtttagtggcagtgggtctgggacagacttcaccctcaccatccattctctggagcaggaggatttcgcaacctattactgtcagcaaagtactgaggatccgtggacgttcggtcaagggaccaaggtggagatcaaa

SEQ ID NO: 513 - protein, 15 aa, Artificial Sequence
  hCD19 46-B11 LCDR1
KASQSVDYDGDSYLN

SEQ ID NO: 514 - protein, 7 aa, Artificial Sequence
  hCD19 46-B11 LCDR2
DASNLVS

SEQ ID NO: 515 - protein, 9 aa, Artificial Sequence
  hCD19 46-B11 LCDR3
QQSTEDPWT

SEQ ID NO: 516 - protein, 124 aa, Artificial Sequence
  hCD19 46-B11 H
QVQLVQSGAEVVRPGASVKVSCKASGYSFTSYWMNWVRQPPGQGLEWIGQIWPGDGDTNYNGKFKGRATMTADASTSTVYMELSSLRSEDTAVYYCARRETTTVGRYYYAMDYWGQGTTVTVSS

SEQ ID NO: 517 - DNA, 372 bp, Artificial Sequence
  hCD19 46-B11 H
caggtgcagctggtccagtctggggctgaggtggtgaggcctggggcctcagtgaaggtttcctgcaaggcttctggctattcattcactagctactggatgaactgggtgaggcagccccctggacagggtcttgagtggattggacagatttggcctggagatggtgatactaactacaatggaaagttcaagggtagagccactatgactgctgacgcatccaccagcacagtctacatggaactcagcagcctgcgatctgaggacactgcggtctattactgtgcaagacgggagactacgacggtaggccgttattactatgctatggactactggggccaagggaccacggtcaccgtctcctcc

SEQ ID NO: 518 - protein, 5 aa, Artificial Sequence
  hCD19 46-B11 HCDR1
SYWMN

SEQ ID NO: 519 - protein, 17 aa, Artificial Sequence
  hCD19 46-B11 HCDR2
QIWPGDGDTNYNGKFKG

SEQ ID NO: 520 - protein, 15 aa, Artificial Sequence
  hCD19 46-B11 HCDR3
RETTTVGRYYYAMDY

SEQ ID NO: 521 - protein, 504 aa, Artificial Sequence
  hCD19 46-B11LH x I2C HL
DIQMTQSPASLSASVGERVTITCKASQSVDYDGDSYLNWYQQIPGKPPKLLIYDASNLVSGIPSRFSGSGSGTDFTLTIHSLEQEDFATYYCQQSTEDPWTFGQGTKVEIKGGGGSGGGGSGGGGSQVQLVQSGAEVVRPGASVKVSCKASGYSFTSYWMNWVRQPPGQGLEWIGQIWPGDGDTNYNGKFKGRATMTADASTSTVYMELSSLRSEDTAVYYCARRETTTVGRYYYAMDYWGQGTTVTVSSGGGGSEVQLVESGGGLVQPGGSLKLSCAASGFTFNKYAMNWVRQAPGKGLEWVARIRSKYNNYATYYADSVKDRFTISRDDSKNTAYLQMNNLKTEDTAVYYCVRHGNFGNSYISYWAYWGQGTLVTVSSGGGGSGGGGSGGGGSQTVVTQEPSLTVSPGGTVTLTCGSSTGAVTSGNYPNWVQQKPGQAPRGLIGGTKFLAPGTPARFSGSLLGGKAALTLSGVQPEDEAEYYCVLWYSNRWVFGGGTKLTVL

SEQ ID NO: 522 - DNA, 1512 bp, Artificial Sequence
  hCD19 46-B11LH x I2C HL
gacatccagatgacccagtctccagcttctttgtctgcgtctgtaggggaaagagtcaccatcacctgcaaggccagccaaagtgttgattatgatggtgatagttatttgaactggtaccaacagataccaggaaagccacccaaactcctcatctatgatgcatccaatctagtttctgggatcccatccaggtttagtggcagtgggtctgggacagacttcaccctcaccatccattctctggagcaggaggatttcgcaacctattactgtcagcaaagtactgaggatccgtggacgttcggtcaagggaccaaggtggagatcaaaggtggtggtggttctggcggcggcggctccggtggtggtggttctcaggtgcagctggtccagtctggggctgaggtggtgaggcctggggcctcagtgaaggtttcctgcaaggcttctggctattcattcactagctactggatgaactgggtgaggcagccccctggacagggtcttgagtggattggacagatttggcctggagatggtgatactaactacaatggaaagttcaagggtagagccactatgactgctgacgcatccaccagcacagtctacatggaactcagcagcctgcgatctgaggacactgcggtctattactgtgcaagacgggagactacgacggtaggccgttattactatgctatggactactggggccaagggaccacggtcaccgtctcctccggaggtggtggatccgaggtgcagctggtcgagtctggaggaggattggtgcagcctggagggtcattgaaactctcatgtgcagcctctggattcaccttcaataagtacgccatgaactgggtccgccaggctccaggaaagggtttggaatgggttgctcgcataagaagtaaatataataattatgcaacatattatgccgattcagtgaaagacaggttcaccatctccagagatgattcaaaaaacactgcctatctacaaatgaacaacttgaaaactgaggacactgccgtgtactactgtgtgagacatgggaacttcggtaatagctacatatcctactgggcttactggggccaagggactctggtcaccgtctcctcaggtggtggtggttctggcggcggcggctccggtggtggtggttctcagactgttgtgactcaggaaccttcactcaccgtatcacctggtggaacagtcacactcacttgtggctcctcgactggggctgttacatctggcaactacccaaactgggtccaacaaaaaccaggtcaggcaccccgtggtctaataggtgggactaagttcctcgcccccggtactcctgccagattctcaggctccctgcttggaggcaaggctgccctcaccctctcaggggtacagccagaggatgaggcagaatattactgtgttctatggtacagcaaccgctgggtgttcggtggaggaaccaaactgactgtccta

SEQ ID NO: 523 - protein, 111 aa, Artificial Sequence
  hCD19 47-A3 L
DIQMTQSPASLSASVGERVTITCKASQSVDYDGDSYLNWYQQIPGKAPKLLIYDASNLVSGVPSRFSGSGSGTDFTLTISSLQTEDFATYYCQQSTEDPWTFGQGTKVEIK

SEQ ID NO: 524 - DNA, 333 bp, Artificial Sequence
  hCD19 47-A3 L
gacatccagatgacccagtctccagcttctttgtctgcgtctgtaggggagagagtcaccatcacctgcaaggccagccaaagtgttgattatgatggtgatagttatttgaactggtaccaacagataccaggaaaggcacccaaactcctcatctatgatgcatccaatctagtttctggggtcccatccaggtttagtggcagtgggtctgggacagacttcaccctcaccatcagttctctgcagacggaggatttcgcaacctattactgtcagcaaagtactgaggatccgtggacgttcggtcaagggaccaaggtggagatcaaa

SEQ ID NO: 525 - protein, 15 aa, Artificial Sequence
  hCD19 47-A3 LCDR1
KASQSVDYDGDSYLN

SEQ ID NO: 526 - protein, 7 aa, Artificial Sequence
  hCD19 47-A3 LCDR2
DASNLVS

SEQ ID NO: 527 - protein, 9 aa, Artificial Sequence
  hCD19 47-A3 LCDR3
QQSTEDPWT

SEQ ID NO: 528 - protein, 124 aa, Artificial Sequence
  hCD19 47-A3 H
QVQLVQSGAEVKKPGASVKISCKASGYAFTSYWMNWVRQRPGQGLEWIGQIWPGDGDTNYNGKFKGRVTMTADASTSTVYMELSSLGSEDTAVYFCARRETTTVGRYYYAMDYWGQGTTVTVSS

SEQ ID NO: 529 - DNA, 372 bp, Artificial Sequence
  hCD19 47-A3 H
caggtgcagctggtccagtctggggctgaggtgaagaagcctggggcctcagtgaagatttcctgcaaggcttctggctatgcattcactagctactggatgaactgggtgaggcagcgccctggacagggtcttgagtggattggacagatttggcctggagatggtgatactaactacaatggaaagttcaagggtagagtcactatgactgctgacgcatccaccagcacagtctacatggaactcagcagcctgggatctgaggacactgcggtctatttctgtgcaagacgggagactacgacggtaggccgttattactatgctatggactactggggccaagggaccacggtcaccgtctcctcc

SEQ ID NO: 530 - protein, 5 aa, Artificial Sequence
  hCD19 47-A3 HCDR1
SYWMN

SEQ ID NO: 531 - protein, 17 aa, Artificial Sequence
  hCD19 47-A3 HCDR2
QIWPGDGDTNYNGKFKG

SEQ ID NO: 532 - protein, 15 aa, Artificial Sequence
  hCD19 47-A3 HCDR3
RETTTVGRYYYAMDY

SEQ ID NO: 533 - protein, 504 aa, Artificial Sequence
  hCD19 47-A3 LH x I2C HL
DIQMTQSPASLSASVGERVTITCKASQSVDYDGDSYLNWYQQIPGKAPKLLIYDASNLVSGVPSRFSGSGSGTDFTLTISSLQTEDFATYYCQQSTEDPWTFGQGTKVEIKGGGGSGGGGSGGGGSQVQLVQSGAEVKKPGASVKISCKASGYAFTSYWMNWVRQRPGQGLEWIGQIWPGDGDTNYNGKFKGRVTMTADASTSTVYMELSSLGSEDTAVYFCARRETTTVGRYYYAMDYWGQGTTVTVSSGGGGSEVQLVESGGGLVQPGGSLKLSCAASGFTFNKYAMNWVRQAPGKGLEWVARIRSKYNNYATYYADSVKDRFTISRDDSKNTAYLQMNNLKTEDTAVYYCVRHGNFGNSYISYWAYWGQGTLVTVSSGGGGSGGGGSGGGGSQTVVTQEPSLTVSPGGTVTLTCGSSTGAVTSGNYPNWVQQKPGQAPRGLIGGTKFLAPGTPARFSGSLLGGKAALTLSGVQPEDEAEYYCVLWYSNRWVFGGGTKLTVL

SEQ ID NO: 534 - DNA, 1512 bp, Artificial Sequence
  hCD19 47-A3 LH x I2C HL
gacatccagatgacccagtctccagcttctttgtctgcgtctgtaggggagagagtcaccatcacctgcaaggccagccaaagtgttgattatgatggtgatagttatttgaactggtaccaacagataccaggaaaggcacccaaactcctcatctatgatgcatccaatctagtttctggggtcccatccaggtttagtggcagtgggtctgggacagacttcaccctcaccatcagttctctgcagacggaggatttcgcaacctattactgtcagcaaagtactgaggatccgtggacgttcggtcaagggaccaaggtggagatcaaaggtggtggtggttctggcggcggcggctccggtggtggtggttctcaggtgcagctggtccagtctggggctgaggtgaagaagcctggggcctcagtgaagatttcctgcaaggcttctggctatgcattcactagctactggatgaactgggtgaggcagcgccctggacagggtcttgagtggattggacagatttggcctggagatggtgatactaactacaatggaaagttcaagggtagagtcactatgactgctgacgcatccaccagcacagtctacatggaactcagcagcctgggatctgaggacactgcggtctatttctgtgcaagacgggagactacgacggtaggccgttattactatgctatggactactggggccaagggaccacggtcaccgtctcctccggaggtggtggatccgaggtgcagctggtcgagtctggaggaggattggtgcagcctggagggtcattgaaactctcatgtgcagcctctggattcaccttcaataagtacgccatgaactgggtccgccaggctccaggaaagggtttggaatgggttgctcgcataagaagtaaatataataattatgcaacatattatgccgattcagtgaaagacaggttcaccatctccagagatgattcaaaaaacactgcctatctacaaatgaacaacttgaaaactgaggacactgccgtgtactactgtgtgagacatgggaacttcggtaatagctacatatcctactgggcttactggggccaagggactctggtcaccgtctcctcaggtggtggtggttctggcggcggcggctccggtggtggtggttctcagactgttgtgactcaggaaccttcactcaccgtatcacctggtggaacagtcacactcacttgtggctcctcgactggggctgttacatctggcaactacccaaactgggtccaacaaaaaccaggtcaggcaccccgtggtctaataggtgggactaagttcctcgcccccggtactcctgccagattctcaggctccctgcttggaggcaaggctgccctcaccctctcaggggtacagccagaggatgaggcagaatattactgtgttctatggtacagcaaccgctgggtgttcggtggaggaaccaaactgactgtccta

SEQ ID NO: 535 - protein, 111 aa, Artificial Sequence
  HD37-DT  L
DIQLTQSPASLAVSLGQRATISCKASQSVDYDGDTYLNWYQQIPGQPPKLLIYDASNLVSGIPPRFSGSGSGTDFTLNIHPVEKVDAATYHCQQSTEDPWTFGGGTKLEIK

SEQ ID NO: 536 - DNA, 333 bp, Artificial Sequence
  HD37-DT  L
gatatccagctgacccagtctccagcttctttggctgtgtctctagggcagagggccaccatctcctgcaaggccagccaaagtgttgattatgatggtgatacttatttgaactggtaccaacagattccaggacagccacccaaactcctcatctatgatgcatccaatctagtttctgggatcccacccaggtttagtggcagtgggtctgggacagacttcaccctcaacatccatcctgtggagaaggtggatgctgcaacctatcactgtcagcaaagtactgaggatccgtggacgttcggtggagggaccaagctcgagatcaaa

SEQ ID NO: 537 - protein, 15 aa, Artificial Sequence
  HD37-DT  LCDR1
KASQSVDYDGDTYLN

SEQ ID NO: 538 - protein, 7 aa, Artificial Sequence
  HD37-DT  LCDR2
DASNLVS

SEQ ID NO: 539 - protein, 9 aa, Artificial Sequence
  HD37-DT  LCDR3
QQSTEDPWT

SEQ ID NO: 540 - protein, 124 aa, Artificial Sequence; identical to SEQ ID NO: 476
  HD37-DT  H

SEQ ID NO: 541 - DNA, 372 bp, Artificial Sequence; identical to SEQ ID NO: 477
  HD37-DT  H

SEQ ID NO: 542 - protein, 5 aa, Artificial Sequence
  HD37-DT  HCDR1
SYWMN

SEQ ID NO: 543 - protein, 17 aa, Artificial Sequence
  HD37-DT  HCDR2
QIWPGDGDTNYNGKFKG

SEQ ID NO: 544 - protein, 15 aa, Artificial Sequence
  HD37-DT  HCDR3
RETTTVGRYYYAMDY

SEQ ID NO: 545 - protein, 504 aa, Artificial Sequence
  HD37-DT LH x I2C HL
DIQLTQSPASLAVSLGQRATISCKASQSVDYDGDTYLNWYQQIPGQPPKLLIYDASNLVSGIPPRFSGSGSGTDFTLNIHPVEKVDAATYHCQQSTEDPWTFGGGTKLEIKGGGGSGGGGSGGGGSQVQLQQSGAELVRPGSSVKISCKASGYAFSSYWMNWVKQRPGQGLEWIGQIWPGDGDTNYNGKFKGKATLTADESSSTAYMQLSSLASEDSAVYFCARRETTTVGRYYYAMDYWGQGTTVTVSSGGGGSEVQLVESGGGLVQPGGSLKLSCAASGFTFNKYAMNWVRQAPGKGLEWVARIRSKYNNYATYYADSVKDRFTISRDDSKNTAYLQMNNLKTEDTAVYYCVRHGNFGNSYISYWAYWGQGTLVTVSSGGGGSGGGGSGGGGSQTVVTQEPSLTVSPGGTVTLTCGSSTGAVTSGNYPNWVQQKPGQAPRGLIGGTKFLAPGTPARFSGSLLGGKAALTLSGVQPEDEAEYYCVLWYSNRWVFGGGTKLTVL

SEQ ID NO: 546 - DNA, 1512 bp, Artificial Sequence
  HD37-DT LH x I2C HL
gatatccagctgacccagtctccagcttctttggctgtgtctctagggcagagggccaccatctcctgcaaggccagccaaagtgttgattatgatggtgatacttatttgaactggtaccaacagattccaggacagccacccaaactcctcatctatgatgcatccaatctagtttctgggatcccacccaggtttagtggcagtgggtctgggacagacttcaccctcaacatccatcctgtggagaaggtggatgctgcaacctatcactgtcagcaaagtactgaggatccgtggacgttcggtggagggaccaagctcgagatcaaaggtggtggtggttctggcggcggcggctccggtggtggtggttctcaggtgcagctgcagcagtctggggctgagctggtgaggcctgggtcctcagtgaagatttcctgcaaggcttctggctatgcattcagtagctactggatgaactgggtgaagcagaggcctggacagggtcttgagtggattggacagatttggcctggagatggtgatactaactacaatggaaagttcaagggtaaagccactctgactgcagacgaatcctccagcacagcctacatgcaactcagcagcctagcatctgaggactctgcggtctatttctgtgcaagacgggagactacgacggtaggccgttattactatgctatggactactggggccaagggaccacggtcaccgtctcctccggaggtggtggatccgaggtgcagctggtcgagtctggaggaggattggtgcagcctggagggtcattgaaactctcatgtgcagcctctggattcaccttcaataagtacgccatgaactgggtccgccaggctccaggaaagggtttggaatgggttgctcgcataagaagtaaatataataattatgcaacatattatgccgattcagtgaaagacaggttcaccatctccagagatgattcaaaaaacactgcctatctacaaatgaacaacttgaaaactgaggacactgccgtgtactactgtgtgagacatgggaacttcggtaatagctacatatcctactgggcttactggggccaagggactctggtcaccgtctcctcaggtggtggtggttctggcggcggcggctccggtggtggtggttctcagactgttgtgactcaggaaccttcactcaccgtatcacctggtggaacagtcacactcacttgtggctcctcgactggggctgttacatctggcaactacccaaactgggtccaacaaaaaccaggtcaggcaccccgtggtctaataggtgggactaagttcctcgcccccggtactcctgccagattctcaggctccctgcttggaggcaaggctgccctcaccctctcaggggtacagccagaggatgaggcagaatattactgtgttctatggtacagcaaccgctgggtgttcggtggaggaaccaaactgactgtccta

SEQ ID NO: 547 - protein, 111 aa, Artificial Sequence
  HD37-A  L
DIQLTQSPASLAVSLGQRATISCKASQSVDYDGASYLNWYQQIPGQPPKLLIYDASNLVSGIPPRFSGSGSGTDFTLNIHPVEKVDAATYHCQQSTEDPWTFGGGTKLEIK

SEQ ID NO: 548 - DNA, 333 bp, Artificial Sequence
  HD37-A  L
gatatccagctgacccagtctccagcttctttggctgtgtctctagggcagagggccaccatctcctgcaaggccagccaaagtgttgattatgatggtgctagttatttgaactggtaccaacagattccaggacagccacccaaactcctcatctatgatgcatccaatctagtttctgggatcccacccaggtttagtggcagtgggtctgggacagacttcaccctcaacatccatcctgtggagaaggtggatgctgcaacctatcactgtcagcaaagtactgaggatccgtggacgttcggtggagggaccaagctcgagatcaaa

SEQ ID NO: 549 - protein, 15 aa, Artificial Sequence
  HD37-A  LCDR1
KASQSVDYDGASYLN

SEQ ID NO: 550 - protein, 7 aa, Artificial Sequence
  HD37-A  LCDR2
DASNLVS

SEQ ID NO: 551 - protein, 9 aa, Artificial Sequence
  HD37-A  LCDR3
QQSTEDPWT

SEQ ID NO: 552 - protein, 124 aa, Artificial Sequence; identical to SEQ ID NO: 476
  HD37-A  H

SEQ ID NO: 553 - DNA, 372 bp, Artificial Sequence; identical to SEQ ID NO: 477
  HD37-A  H

SEQ ID NO: 554 - protein, 5 aa, Artificial Sequence
  HD37-A  HCDR1
SYWMN

SEQ ID NO: 555 - protein, 17 aa, Artificial Sequence
  HD37-A  HCDR2
QIWPGDGDTNYNGKFKG

SEQ ID NO: 556 - protein, 15 aa, Artificial Sequence
  HD37-A  HCDR3
RETTTVGRYYYAMDY

SEQ ID NO: 557 - protein, 504 aa, Artificial Sequence
  HD37-A LH x I2C HL
DIQLTQSPASLAVSLGQRATISCKASQSVDYDGASYLNWYQQIPGQPPKLLIYDASNLVSGIPPRFSGSGSGTDFTLNIHPVEKVDAATYHCQQSTEDPWTFGGGTKLEIKGGGGSGGGGSGGGGSQVQLQQSGAELVRPGSSVKISCKASGYAFSSYWMNWVKQRPGQGLEWIGQIWPGDGDTNYNGKFKGKATLTADESSSTAYMQLSSLASEDSAVYFCARRETTTVGRYYYAMDYWGQGTTVTVSSGGGGSEVQLVESGGGLVQPGGSLKLSCAASGFTFNKYAMNWVRQAPGKGLEWVARIRSKYNNYATYYADSVKDRFTISRDDSKNTAYLQMNNLKTEDTAVYYCVRHGNFGNSYISYWAYWGQGTLVTVSSGGGGSGGGGSGGGGSQTVVTQEPSLTVSPGGTVTLTCGSSTGAVTSGNYPNWVQQKPGQAPRGLIGGTKFLAPGTPARFSGSLLGGKAALTLSGVQPEDEAEYYCVLWYSNRWVFGGGTKLTVL

SEQ ID NO: 558 - DNA, 1512 bp, Artificial Sequence
  HD37-A LH x I2C HL
gatatccagctgacccagtctccagcttctttggctgtgtctctagggcagagggccaccatctcctgcaaggccagccaaagtgttgattatgatggtgctagttatttgaactggtaccaacagattccaggacagccacccaaactcctcatctatgatgcatccaatctagtttctgggatcccacccaggtttagtggcagtgggtctgggacagacttcaccctcaacatccatcctgtggagaaggtggatgctgcaacctatcactgtcagcaaagtactgaggatccgtggacgttcggtggagggaccaagctcgagatcaaaggtggtggtggttctggcggcggcggctccggtggtggtggttctcaggtgcagctgcagcagtctggggctgagctggtgaggcctgggtcctcagtgaagatttcctgcaaggcttctggctatgcattcagtagctactggatgaactgggtgaagcagaggcctggacagggtcttgagtggattggacagatttggcctggagatggtgatactaactacaatggaaagttcaagggtaaagccactctgactgcagacgaatcctccagcacagcctacatgcaactcagcagcctagcatctgaggactctgcggtctatttctgtgcaagacgggagactacgacggtaggccgttattactatgctatggactactggggccaagggaccacggtcaccgtctcctccggaggtggtggatccgaggtgcagctggtcgagtctggaggaggattggtgcagcctggagggtcattgaaactctcatgtgcagcctctggattcaccttcaataagtacgccatgaactgggtccgccaggctccaggaaagggtttggaatgggttgctcgcataagaagtaaatataataattatgcaacatattatgccgattcagtgaaagacaggttcaccatctccagagatgattcaaaaaacactgcctatctacaaatgaacaacttgaaaactgaggacactgccgtgtactactgtgtgagacatgggaacttcggtaatagctacatatcctactgggcttactggggccaagggactctggtcaccgtctcctcaggtggtggtggttctggcggcggcggctccggtggtggtggttctcagactgttgtgactcaggaaccttcactcaccgtatcacctggtggaacagtcacactcacttgtggctcctcgactggggctgttacatctggcaactacccaaactgggtccaacaaaaaccaggtcaggcaccccgtggtctaataggtgggactaagttcctcgcccccggtactcctgccagattctcaggctccctgcttggaggcaaggctgccctcaccctctcaggggtacagccagaggatgaggcagaatattactgtgttctatggtacagcaaccgctgggtgttcggtggaggaaccaaactgactgtccta

SEQ ID NO: 559 - protein, 111 aa, Artificial Sequence
  HD37-G L
DIQLTQSPASLAVSLGQRATISCKASQSVDYDGGSYLNWYQQIPGQPPKLLIYDASNLVSGIPPRFSGSGSGTDFTLNIHPVEKVDAATYHCQQSTEDPWTFGGGTKLEIK

SEQ ID NO: 560 - DNA, 333 bp, Artificial Sequence
  HD37-G L
gatatccagctgacccagtctccagcttctttggctgtgtctctagggcagagggccaccatctcctgcaaggccagccaaagtgttgattatgatggtggtagttatttgaactggtaccaacagattccaggacagccacccaaactcctcatctatgatgcatccaatctagtttctgggatcccacccaggtttagtggcagtgggtctgggacagacttcaccctcaacatccatcctgtggagaaggtggatgctgcaacctatcactgtcagcaaagtactgaggatccgtggacgttcggtggagggaccaagctcgagatcaaa

SEQ ID NO: 561 - protein, 15 aa, Artificial Sequence
  HD37-G LCDR1
KASQSVDYDGGSYLN

SEQ ID NO: 562 - protein, 7 aa, Artificial Sequence
  HD37-G LCDR2
DASNLVS

SEQ ID NO: 563 - protein, 9 aa, Artificial Sequence
  HD37-G LCDR3
QQSTEDPWT

SEQ ID NO: 564 - protein, 124 aa, Artificial Sequence; identical to SEQ ID NO: 476
  HD37-G H

SEQ ID NO: 565 - DNA, 372 bp, Artificial Sequence; identical to SEQ ID NO: 477
  HD37-G H

SEQ ID NO: 566 - protein, 5 aa, Artificial Sequence
  HD37-G HCDR1
SYWMN

SEQ ID NO: 567 - protein, 17 aa, Artificial Sequence
  HD37-G HCDR2
QIWPGDGDTNYNGKFKG

SEQ ID NO: 568 - protein, 15 aa, Artificial Sequence
  HD37-G HCDR3
RETTTVGRYYYAMDY

SEQ ID NO: 569 - protein, 504 aa, Artificial Sequence
  HD37-G LH x I2C HL
DIQLTQSPASLAVSLGQRATISCKASQSVDYDGGSYLNWYQQIPGQPPKLLIYDASNLVSGIPPRFSGSGSGTDFTLNIHPVEKVDAATYHCQQSTEDPWTFGGGTKLEIKGGGGSGGGGSGGGGSQVQLQQSGAELVRPGSSVKISCKASGYAFSSYWMNWVKQRPGQGLEWIGQIWPGDGDTNYNGKFKGKATLTADESSSTAYMQLSSLASEDSAVYFCARRETTTVGRYYYAMDYWGQGTTVTVSSGGGGSEVQLVESGGGLVQPGGSLKLSCAASGFTFNKYAMNWVRQAPGKGLEWVARIRSKYNNYATYYADSVKDRFTISRDDSKNTAYLQMNNLKTEDTAVYYCVRHGNFGNSYISYWAYWGQGTLVTVSSGGGGSGGGGSGGGGSQTVVTQEPSLTVSPGGTVTLTCGSSTGAVTSGNYPNWVQQKPGQAPRGLIGGTKFLAPGTPARFSGSLLGGKAALTLSGVQPEDEAEYYCVLWYSNRWVFGGGTKLTVL

SEQ ID NO: 570 - DNA, 1512 bp, Artificial Sequence
  HD37-G LH x I2C HL
gatatccagctgacccagtctccagcttctttggctgtgtctctagggcagagggccaccatctcctgcaaggccagccaaagtgttgattatgatggtggtagttatttgaactggtaccaacagattccaggacagccacccaaactcctcatctatgatgcatccaatctagtttctgggatcccacccaggtttagtggcagtgggtctgggacagacttcaccctcaacatccatcctgtggagaaggtggatgctgcaacctatcactgtcagcaaagtactgaggatccgtggacgttcggtggagggaccaagctcgagatcaaaggtggtggtggttctggcggcggcggctccggtggtggtggttctcaggtgcagctgcagcagtctggggctgagctggtgaggcctgggtcctcagtgaagatttcctgcaaggcttctggctatgcattcagtagctactggatgaactgggtgaagcagaggcctggacagggtcttgagtggattggacagatttggcctggagatggtgatactaactacaatggaaagttcaagggtaaagccactctgactgcagacgaatcctccagcacagcctacatgcaactcagcagcctagcatctgaggactctgcggtctatttctgtgcaagacgggagactacgacggtaggccgttattactatgctatggactactggggccaagggaccacggtcaccgtctcctccggaggtggtggatccgaggtgcagctggtcgagtctggaggaggattggtgcagcctggagggtcattgaaactctcatgtgcagcctctggattcaccttcaataagtacgccatgaactgggtccgccaggctccaggaaagggtttggaatgggttgctcgcataagaagtaaatataataattatgcaacatattatgccgattcagtgaaagacaggttcaccatctccagagatgattcaaaaaacactgcctatctacaaatgaacaacttgaaaactgaggacactgccgtgtactactgtgtgagacatgggaacttcggtaatagctacatatcctactgggcttactggggccaagggactctggtcaccgtctcctcaggtggtggtggttctggcggcggcggctccggtggtggtggttctcagactgttgtgactcaggaaccttcactcaccgtatcacctggtggaacagtcacactcacttgtggctcctcgactggggctgttacatctggcaactacccaaactgggtccaacaaaaaccaggtcaggcaccccgtggtctaataggtgggactaagttcctcgcccccggtactcctgccagattctcaggctccctgcttggaggcaaggctgccctcaccctctcaggggtacagccagaggatgaggcagaatattactgtgttctatggtacagcaaccgctgggtgttcggtggaggaaccaaactgactgtccta

SEQ ID NO: 571 - protein, 111 aa, Artificial Sequence
  HD37-S L
DIQLTQSPASLAVSLGQRATISCKASQSVDYDGSSYLNWYQQIPGQPPKLLIYDASNLVSGIPPRFSGSGSGTDFTLNIHPVEKVDAATYHCQQSTEDPWTFGGGTKLEIK

SEQ ID NO: 572 - DNA, 333 bp, Artificial Sequence
  HD37-S L
gatatccagctgacccagtctccagcttctttggctgtgtctctagggcagagggccaccatctcctgcaaggccagccaaagtgttgattatgatggttctagttatttgaactggtaccaacagattccaggacagccacccaaactcctcatctatgatgcatccaatctagtttctgggatcccacccaggtttagtggcagtgggtctgggacagacttcaccctcaacatccatcctgtggagaaggtggatgctgcaacctatcactgtcagcaaagtactgaggatccgtggacgttcggtggagggaccaagctcgagatcaaa

SEQ ID NO: 573 - protein, 15 aa, Artificial Sequence
  HD37-S LCDR1
KASQSVDYDGSSYLN

SEQ ID NO: 574 - protein, 7 aa, Artificial Sequence
  HD37-S LCDR2
DASNLVS

SEQ ID NO: 575 - protein, 9 aa, Artificial Sequence
  HD37-S LCDR3
QQSTEDPWT

SEQ ID NO: 576 - protein, 124 aa, Artificial Sequence; identical to SEQ ID NO: 476
  HD37-S H

SEQ ID NO: 577 - DNA, 372 bp, Artificial Sequence; identical to SEQ ID NO: 477
  HD37-S H

SEQ ID NO: 578 - protein, 5 aa, Artificial Sequence
  HD37-S HCDR1
SYWMN

SEQ ID NO: 579 - protein, 17 aa, Artificial Sequence
  HD37-S HCDR2
QIWPGDGDTNYNGKFKG

SEQ ID NO: 580 - protein, 15 aa, Artificial Sequence
  HD37-S HCDR3
RETTTVGRYYYAMDY

SEQ ID NO: 581 - protein, 504 aa, Artificial Sequence
  HD37-S LH x I2C HL
DIQLTQSPASLAVSLGQRATISCKASQSVDYDGSSYLNWYQQIPGQPPKLLIYDASNLVSGIPPRFSGSGSGTDFTLNIHPVEKVDAATYHCQQSTEDPWTFGGGTKLEIKGGGGSGGGGSGGGGSQVQLQQSGAELVRPGSSVKISCKASGYAFSSYWMNWVKQRPGQGLEWIGQIWPGDGDTNYNGKFKGKATLTADESSSTAYMQLSSLASEDSAVYFCARRETTTVGRYYYAMDYWGQGTTVTVSSGGGGSEVQLVESGGGLVQPGGSLKLSCAASGFTFNKYAMNWVRQAPGKGLEWVARIRSKYNNYATYYADSVKDRFTISRDDSKNTAYLQMNNLKTEDTAVYYCVRHGNFGNSYISYWAYWGQGTLVTVSSGGGGSGGGGSGGGGSQTVVTQEPSLTVSPGGTVTLTCGSSTGAVTSGNYPNWVQQKPGQAPRGLIGGTKFLAPGTPARFSGSLLGGKAALTLSGVQPEDEAEYYCVLWYSNRWVFGGGTKLTVL

SEQ ID NO: 582 - protein, 1512 aa, Artificial Sequence
  HD37-S LH x I2C HL
GATATCCAGCTGACCCAGTCTCCAGCTTCTTTGGCTGTGTCTCTAGGGCAGAGGGCCACCATCTCCTGCAAGGCCAGCCAAAGTGTTGATTATGATGGTTCTAGTTATTTGAACTGGTACCAACAGATTCCAGGACAGCCACCCAAACTCCTCATCTATGATGCATCCAATCTAGTTTCTGGGATCCCACCCAGGTTTAGTGGCAGTGGGTCTGGGACAGACTTCACCCTCAACATCCATCCTGTGGAGAAGGTGGATGCTGCAACCTATCACTGTCAGCAAAGTACTGAGGATCCGTGGACGTTCGGTGGAGGGACCAAGCTCGAGATCAAAGGTGGTGGTGGTTCTGGCGGCGGCGGCTCCGGTGGTGGTGGTTCTCAGGTGCAGCTGCAGCAGTCTGGGGCTGAGCTGGTGAGGCCTGGGTCCTCAGTGAAGATTTCCTGCAAGGCTTCTGGCTATGCATTCAGTAGCTACTGGATGAACTGGGTGAAGCAGAGGCCTGGACAGGGTCTTGAGTGGATTGGACAGATTTGGCCTGGAGATGGTGATACTAACTACAATGGAAAGTTCAAGGGTAAAGCCACTCTGACTGCAGACGAATCCTCCAGCACAGCCTACATGCAACTCAGCAGCCTAGCATCTGAGGACTCTGCGGTCTATTTCTGTGCAAGACGGGAGACTACGACGGTAGGCCGTTATTACTATGCTATGGACTACTGGGGCCAAGGGACCACGGTCACCGTCTCCTCCGGAGGTGGTGGATCCGAGGTGCAGCTGGTCGAGTCTGGAGGAGGATTGGTGCAGCCTGGAGGGTCATTGAAACTCTCATGTGCAGCCTCTGGATTCACCTTCAATAAGTACGCCATGAACTGGGTCCGCCAGGCTCCAGGAAAGGGTTTGGAATGGGTTGCTCGCATAAGAAGTAAATATAATAATTATGCAACATATTATGCCGATTCAGTGAAAGACAGGTTCACCATCTCCAGAGATGATTCAAAAAACACTGCCTATCTACAAATGAACAACTTGAAAACTGAGGACACTGCCGTGTACTACTGTGTGAGACATGGGAACTTCGGTAATAGCTACATATCCTACTGGGCTTACTGGGGCCAAGGGACTCTGGTCACCGTCTCCTCAGGTGGTGGTGGTTCTGGCGGCGGCGGCTCCGGTGGTGGTGGTTCTCAGACTGTTGTGACTCAGGAACCTTCACTCACCGTATCACCTGGTGGAACAGTCACACTCACTTGTGGCTCCTCGACTGGGGCTGTTACATCTGGCAACTACCCAAACTGGGTCCAACAAAAACCAGGTCAGGCACCCCGTGGTCTAATAGGTGGGACTAAGTTCCTCGCCCCCGGTACTCCTGCCAGATTCTCAGGCTCCCTGCTTGGAGGCAAGGCTGCCCTCACCCTCTCAGGGGTACAGCCAGAGGATGAGGCAGAATATTACTGTGTTCTATGGTACAGCAACCGCTGGGTGTTCGGTGGAGGAACCAAACTGACTGTCCTA

SEQ ID NO: 583 - protein, 111 aa, Artificial Sequence
  HD37-T L
DIQLTQSPASLAVSLGQRATISCKASQSVDYDGTSYLNWYQQIPGQPPKLLIYDASNLVSGIPPRFSGSGSGTDFTLNIHPVEKVDAATYHCQQSTEDPWTFGGGTKLEIK

SEQ ID NO: 584 - DNA, 333 bp, Artificial Sequence
  HD37-T L
gatatccagctgacccagtctccagcttctttggctgtgtctctagggcagagggccaccatctcctgcaaggccagccaaagtgttgattatgatggtacaagttatttgaactggtaccaacagattccaggacagccacccaaactcctcatctatgatgcatccaatctagtttctgggatcccacccaggtttagtggcagtgggtctgggacagacttcaccctcaacatccatcctgtggagaaggtggatgctgcaacctatcactgtcagcaaagtactgaggatccgtggacgttcggtggagggaccaagctcgagatcaaa

SEQ ID NO: 585 - protein, 15 aa, Artificial Sequence
  HD37-T LCDR1
KASQSVDYDGTSYLN

SEQ ID NO: 586 - protein, 7 aa, Artificial Sequence
  HD37-T LCDR2
DASNLVS

SEQ ID NO: 587 - protein, 9 aa, Artificial Sequence
  HD37-T LCDR3
QQSTEDPWT

SEQ ID NO: 588 - protein, 124 aa, Artificial Sequence; identical to SEQ ID NO: 476
  HD37-T H

SEQ ID NO: 589 - DNA, 372 bp, Artificial Sequence; identical to SEQ ID NO: 477
  HD37-T H

SEQ ID NO: 590 - protein, 5 aa, Artificial Sequence
  HD37-T HCDR1
SYWMN

SEQ ID NO: 591 - protein, 17 aa, Artificial Sequence
  HD37-T HCDR2
QIWPGDGDTNYNGKFKG

SEQ ID NO: 592 - protein, 15 aa, Artificial Sequence
  HD37-T HCDR3
RETTTVGRYYYAMDY

SEQ ID NO: 593 - protein, 504 aa, Artificial Sequence
  HD37-T LH x I2C HL
DIQLTQSPASLAVSLGQRATISCKASQSVDYDGTSYLNWYQQIPGQPPKLLIYDASNLVSGIPPRFSGSGSGTDFTLNIHPVEKVDAATYHCQQSTEDPWTFGGGTKLEIKGGGGSGGGGSGGGGSQVQLQQSGAELVRPGSSVKISCKASGYAFSSYWMNWVKQRPGQGLEWIGQIWPGDGDTNYNGKFKGKATLTADESSSTAYMQLSSLASEDSAVYFCARRETTTVGRYYYAMDYWGQGTTVTVSSGGGGSEVQLVESGGGLVQPGGSLKLSCAASGFTFNKYAMNWVRQAPGKGLEWVARIRSKYNNYATYYADSVKDRFTISRDDSKNTAYLQMNNLKTEDTAVYYCVRHGNFGNSYISYWAYWGQGTLVTVSSGGGGSGGGGSGGGGSQTVVTQEPSLTVSPGGTVTLTCGSSTGAVTSGNYPNWVQQKPGQAPRGLIGGTKFLAPGTPARFSGSLLGGKAALTLSGVQPEDEAEYYCVLWYSNRWVFGGGTKLTVL

SEQ ID NO: 594 - DNA, 1512 bp, Artificial Sequence
  HD37-T LH x I2C HL
gatatccagctgacccagtctccagcttctttggctgtgtctctagggcagagggccaccatctcctgcaaggccagccaaagtgttgattatgatggtacaagttatttgaactggtaccaacagattccaggacagccacccaaactcctcatctatgatgcatccaatctagtttctgggatcccacccaggtttagtggcagtgggtctgggacagacttcaccctcaacatccatcctgtggagaaggtggatgctgcaacctatcactgtcagcaaagtactgaggatccgtggacgttcggtggagggaccaagctcgagatcaaaggtggtggtggttctggcggcggcggctccggtggtggtggttctcaggtgcagctgcagcagtctggggctgagctggtgaggcctgggtcctcagtgaagatttcctgcaaggcttctggctatgcattcagtagctactggatgaactgggtgaagcagaggcctggacagggtcttgagtggattggacagatttggcctggagatggtgatactaactacaatggaaagttcaagggtaaagccactctgactgcagacgaatcctccagcacagcctacatgcaactcagcagcctagcatctgaggactctgcggtctatttctgtgcaagacgggagactacgacggtaggccgttattactatgctatggactactggggccaagggaccacggtcaccgtctcctccggaggtggtggatccgaggtgcagctggtcgagtctggaggaggattggtgcagcctggagggtcattgaaactctcatgtgcagcctctggattcaccttcaataagtacgccatgaactgggtccgccaggctccaggaaagggtttggaatgggttgctcgcataagaagtaaatataataattatgcaacatattatgccgattcagtgaaagacaggttcaccatctccagagatgattcaaaaaacactgcctatctacaaatgaacaacttgaaaactgaggacactgccgtgtactactgtgtgagacatgggaacttcggtaatagctacatatcctactgggcttactggggccaagggactctggtcaccgtctcctcaggtggtggtggttctggcggcggcggctccggtggtggtggttctcagactgttgtgactcaggaaccttcactcaccgtatcacctggtggaacagtcacactcacttgtggctcctcgactggggctgttacatctggcaactacccaaactgggtccaacaaaaaccaggtcaggcaccccgtggtctaataggtgggactaagttcctcgcccccggtactcctgccagattctcaggctccctgcttggaggcaaggctgccctcaccctctcaggggtacagccagaggatgaggcagaatattactgtgttctatggtacagcaaccgctgggtgttcggtggaggaaccaaactgactgtccta

SEQ ID NO: 595 - protein, 111 aa, Artificial Sequence
  HD37-I L
DIQLTQSPASLAVSLGQRATISCKASQSVDYDGISYLNWYQQIPGQPPKLLIYDASNLVSGIPPRFSGSGSGTDFTLNIHPVEKVDAATYHCQQSTEDPWTFGGGTKLEIK

SEQ ID NO: 596 - DNA, 333 bp, Artificial Sequence
  HD37-I L
gatatccagctgacccagtctccagcttctttggctgtgtctctagggcagagggccaccatctcctgcaaggccagccaaagtgttgattatgatggtatcagttatttgaactggtaccaacagattccaggacagccacccaaactcctcatctatgatgcatccaatctagtttctgggatcccacccaggtttagtggcagtgggtctgggacagacttcaccctcaacatccatcctgtggagaaggtggatgctgcaacctatcactgtcagcaaagtactgaggatccgtggacgttcggtggagggaccaagctcgagatcaaa

SEQ ID NO: 597 - protein, 15 aa, Artificial Sequence
  HD37-I LCDR1
KASQSVDYDGISYLN

SEQ ID NO: 598 - protein, 7 aa, Artificial Sequence
  HD37-I LCDR2
DASNLVS

SEQ ID NO: 599 - protein, 9 aa, Artificial Sequence
  HD37-I LCDR3
QQSTEDPWT

SEQ ID NO: 600 - protein, 124 aa, Artificial Sequence; identical to SEQ ID NO: 476
  HD37-I H

SEQ ID NO: 601 - DNA, 372 bp, Artificial Sequence; identical to SEQ ID NO: 477
  HD37-I H

SEQ ID NO: 602 - protein, 5 aa, Artificial Sequence
  HD37-I HCDR1
SYWMN

SEQ ID NO: 603 - protein, 17 aa, Artificial Sequence
  HD37-I HCDR2
QIWPGDGDTNYNGKFKG

SEQ ID NO: 604 - protein, 15 aa, Artificial Sequence
  HD37-I HCDR3
RETTTVGRYYYAMDY

SEQ ID NO: 605 - protein, 504 aa, Artificial Sequence
  HD37-I LH x I2C HL
DIQLTQSPASLAVSLGQRATISCKASQSVDYDGISYLNWYQQIPGQPPKLLIYDASNLVSGIPPRFSGSGSGTDFTLNIHPVEKVDAATYHCQQSTEDPWTFGGGTKLEIKGGGGSGGGGSGGGGSQVQLQQSGAELVRPGSSVKISCKASGYAFSSYWMNWVKQRPGQGLEWIGQIWPGDGDTNYNGKFKGKATLTADESSSTAYMQLSSLASEDSAVYFCARRETTTVGRYYYAMDYWGQGTTVTVSSGGGGSEVQLVESGGGLVQPGGSLKLSCAASGFTFNKYAMNWVRQAPGKGLEWVARIRSKYNNYATYYADSVKDRFTISRDDSKNTAYLQMNNLKTEDTAVYYCVRHGNFGNSYISYWAYWGQGTLVTVSSGGGGSGGGGSGGGGSQTVVTQEPSLTVSPGGTVTLTCGSSTGAVTSGNYPNWVQQKPGQAPRGLIGGTKFLAPGTPARFSGSLLGGKAALTLSGVQPEDEAEYYCVLWYSNRWVFGGGTKLTVL

SEQ ID NO: 606 - DNA, 1512 bp, Artificial Sequence
  HD37-I LH x I2C HL
gatatccagctgacccagtctccagcttctttggctgtgtctctagggcagagggccaccatctcctgcaaggccagccaaagtgttgattatgatggtatcagttatttgaactggtaccaacagattccaggacagccacccaaactcctcatctatgatgcatccaatctagtttctgggatcccacccaggtttagtggcagtgggtctgggacagacttcaccctcaacatccatcctgtggagaaggtggatgctgcaacctatcactgtcagcaaagtactgaggatccgtggacgttcggtggagggaccaagctcgagatcaaaggtggtggtggttctggcggcggcggctccggtggtggtggttctcaggtgcagctgcagcagtctggggctgagctggtgaggcctgggtcctcagtgaagatttcctgcaaggcttctggctatgcattcagtagctactggatgaactgggtgaagcagaggcctggacagggtcttgagtggattggacagatttggcctggagatggtgatactaactacaatggaaagttcaagggtaaagccactctgactgcagacgaatcctccagcacagcctacatgcaactcagcagcctagcatctgaggactctgcggtctatttctgtgcaagacgggagactacgacggtaggccgttattactatgctatggactactggggccaagggaccacggtcaccgtctcctccggaggtggtggatccgaggtgcagctggtcgagtctggaggaggattggtgcagcctggagggtcattgaaactctcatgtgcagcctctggattcaccttcaataagtacgccatgaactgggtccgccaggctccaggaaagggtttggaatgggttgctcgcataagaagtaaatataataattatgcaacatattatgccgattcagtgaaagacaggttcaccatctccagagatgattcaaaaaacactgcctatctacaaatgaacaacttgaaaactgaggacactgccgtgtactactgtgtgagacatgggaacttcggtaatagctacatatcctactgggcttactggggccaagggactctggtcaccgtctcctcaggtggtggtggttctggcggcggcggctccggtggtggtggttctcagactgttgtgactcaggaaccttcactcaccgtatcacctggtggaacagtcacactcacttgtggctcctcgactggggctgttacatctggcaactacccaaactgggtccaacaaaaaccaggtcaggcaccccgtggtctaataggtgggactaagttcctcgcccccggtactcctgccagattctcaggctccctgcttggaggcaaggctgccctcaccctctcaggggtacagccagaggatgaggcagaatattactgtgttctatggtacagcaaccgctgggtgttcggtggaggaaccaaactgactgtccta

SEQ ID NO: 607 - protein, 111 aa, Artificial Sequence
  HD37-L L
DIQLTQSPASLAVSLGQRATISCKASQSVDYDGLSYLNWYQQIPGQPPKLLIYDASNLVSGIPPRFSGSGSGTDFTLNIHPVEKVDAATYHCQQSTEDPWTFGGGTKLEIK

SEQ ID NO: 608 - DNA, 333 bp, Artificial Sequence
  HD37-L L
gatatccagctgacccagtctccagcttctttggctgtgtctctagggcagagggccaccatctcctgcaaggccagccaaagtgttgattatgatggtctgagttatttgaactggtaccaacagattccaggacagccacccaaactcctcatctatgatgcatccaatctagtttctgggatcccacccaggtttagtggcagtgggtctgggacagacttcaccctcaacatccatcctgtggagaaggtggatgctgcaacctatcactgtcagcaaagtactgaggatccgtggacgttcggtggagggaccaagctcgagatcaaa

SEQ ID NO: 609 - protein, 15 aa, Artificial Sequence
  HD37-L LCDR1
KASQSVDYDGLSYLN

SEQ ID NO: 610 - protein, 7 aa, Artificial Sequence
  HD37-L LCDR2
DASNLVS

SEQ ID NO: 611 - protein, 9 aa, Artificial Sequence
  HD37-L LCDR3
QQSTEDPWT

SEQ ID NO: 612 - protein, 124 aa, Artificial Sequence; identical to SEQ ID NO: 476
  HD37-L H

SEQ ID NO: 613 - DNA, 372 bp, Artificial Sequence; identical to SEQ ID NO: 477
  HD37-L H

SEQ ID NO: 614 - protein, 5 aa, Artificial Sequence
  HD37-L HCDR1
SYWMN

SEQ ID NO: 615 - protein, 17 aa, Artificial Sequence
  HD37-L HCDR2
QIWPGDGDTNYNGKFKG

SEQ ID NO: 616 - protein, 15 aa, Artificial Sequence
  HD37-L HCDR3
RETTTVGRYYYAMDY

SEQ ID NO: 617 - protein, 504 aa, Artificial Sequence
  HD37-L LH x I2C HL
DIQLTQSPASLAVSLGQRATISCKASQSVDYDGLSYLNWYQQIPGQPPKLLIYDASNLVSGIPPRFSGSGSGTDFTLNIHPVEKVDAATYHCQQSTEDPWTFGGGTKLEIKGGGGSGGGGSGGGGSQVQLQQSGAELVRPGSSVKISCKASGYAFSSYWMNWVKQRPGQGLEWIGQIWPGDGDTNYNGKFKGKATLTADESSSTAYMQLSSLASEDSAVYFCARRETTTVGRYYYAMDYWGQGTTVTVSSGGGGSEVQLVESGGGLVQPGGSLKLSCAASGFTFNKYAMNWVRQAPGKGLEWVARIRSKYNNYATYYADSVKDRFTISRDDSKNTAYLQMNNLKTEDTAVYYCVRHGNFGNSYISYWAYWGQGTLVTVSSGGGGSGGGGSGGGGSQTVVTQEPSLTVSPGGTVTLTCGSSTGAVTSGNYPNWVQQKPGQAPRGLIGGTKFLAPGTPARFSGSLLGGKAALTLSGVQPEDEAEYYCVLWYSNRWVFGGGTKLTVL

SEQ ID NO: 618 - DNA, 1512 bp, Artificial Sequence
  HD37-L LH x I2C HL
gatatccagctgacccagtctccagcttctttggctgtgtctctagggcagagggccaccatctcctgcaaggccagccaaagtgttgattatgatggtctgagttatttgaactggtaccaacagattccaggacagccacccaaactcctcatctatgatgcatccaatctagtttctgggatcccacccaggtttagtggcagtgggtctgggacagacttcaccctcaacatccatcctgtggagaaggtggatgctgcaacctatcactgtcagcaaagtactgaggatccgtggacgttcggtggagggaccaagctcgagatcaaaggtggtggtggttctggcggcggcggctccggtggtggtggttctcaggtgcagctgcagcagtctggggctgagctggtgaggcctgggtcctcagtgaagatttcctgcaaggcttctggctatgcattcagtagctactggatgaactgggtgaagcagaggcctggacagggtcttgagtggattggacagatttggcctggagatggtgatactaactacaatggaaagttcaagggtaaagccactctgactgcagacgaatcctccagcacagcctacatgcaactcagcagcctagcatctgaggactctgcggtctatttctgtgcaagacgggagactacgacggtaggccgttattactatgctatggactactggggccaagggaccacggtcaccgtctcctccggaggtggtggatccgaggtgcagctggtcgagtctggaggaggattggtgcagcctggagggtcattgaaactctcatgtgcagcctctggattcaccttcaataagtacgccatgaactgggtccgccaggctccaggaaagggtttggaatgggttgctcgcataagaagtaaatataataattatgcaacatattatgccgattcagtgaaagacaggttcaccatctccagagatgattcaaaaaacactgcctatctacaaatgaacaacttgaaaactgaggacactgccgtgtactactgtgtgagacatgggaacttcggtaatagctacatatcctactgggcttactggggccaagggactctggtcaccgtctcctcaggtggtggtggttctggcggcggcggctccggtggtggtggttctcagactgttgtgactcaggaaccttcactcaccgtatcacctggtggaacagtcacactcacttgtggctcctcgactggggctgttacatctggcaactacccaaactgggtccaacaaaaaccaggtcaggcaccccgtggtctaataggtgggactaagttcctcgcccccggtactcctgccagattctcaggctccctgcttggaggcaaggctgccctcaccctctcaggggtacagccagaggatgaggcagaatattactgtgttctatggtacagcaaccgctgggtgttcggtggaggaaccaaactgactgtccta

SEQ ID NO: 619 - protein, 111 aa, Artificial Sequence
  HD37-V L
DIQLTQSPASLAVSLGQRATISCKASQSVDYDGVSYLNWYQQIPGQPPKLLIYDASNLVSGIPPRFSGSGSGTDFTLNIHPVEKVDAATYHCQQSTEDPWTFGGGTKLEIK

SEQ ID NO: 620 - DNA, 333 bp, Artificial Sequence
  HD37-V L
gatatccagctgacccagtctccagcttctttggctgtgtctctagggcagagggccaccatctcctgcaaggccagccaaagtgttgattatgatggtgtcagttatttgaactggtaccaacagattccaggacagccacccaaactcctcatctatgatgcatccaatctagtttctgggatcccacccaggtttagtggcagtgggtctgggacagacttcaccctcaacatccatcctgtggagaaggtggatgctgcaacctatcactgtcagcaaagtactgaggatccgtggacgttcggtggagggaccaagctcgagatcaaa

SEQ ID NO: 621 - protein, 15 aa, Artificial Sequence
  HD37-V LCDR1
KASQSVDYDGVSYLN

SEQ ID NO: 622 - protein, 7 aa, Artificial Sequence
  HD37-V LCDR2
DASNLVS

SEQ ID NO: 623 - protein, 9 aa, Artificial Sequence
  HD37-V LCDR3
QQSTEDPWT

SEQ ID NO: 624 - protein, 124 aa, Artificial Sequence; identical to SEQ ID NO: 476
  HD37-V H

SEQ ID NO: 625 - DNA, 372 bp, Artificial Sequence; identical to SEQ ID NO: 477
  HD37-V H

SEQ ID NO: 626 - protein, 5 aa, Artificial Sequence
  HD37-V HCDR1
SYWMN

SEQ ID NO: 627 - protein, 17 aa, Artificial Sequence
  HD37-V HCDR2
QIWPGDGDTNYNGKFKG

SEQ ID NO: 628 - protein, 15 aa, Artificial Sequence
  HD37-V HCDR3
RETTTVGRYYYAMDY

SEQ ID NO: 629 - protein, 504 aa, Artificial Sequence
  HD37-V LH x I2C HL
DIQLTQSPASLAVSLGQRATISCKASQSVDYDGVSYLNWYQQIPGQPPKLLIYDASNLVSGIPPRFSGSGSGTDFTLNIHPVEKVDAATYHCQQSTEDPWTFGGGTKLEIKGGGGSGGGGSGGGGSQVQLQQSGAELVRPGSSVKISCKASGYAFSSYWMNWVKQRPGQGLEWIGQIWPGDGDTNYNGKFKGKATLTADESSSTAYMQLSSLASEDSAVYFCARRETTTVGRYYYAMDYWGQGTTVTVSSGGGGSEVQLVESGGGLVQPGGSLKLSCAASGFTFNKYAMNWVRQAPGKGLEWVARIRSKYNNYATYYADSVKDRFTISRDDSKNTAYLQMNNLKTEDTAVYYCVRHGNFGNSYISYWAYWGQGTLVTVSSGGGGSGGGGSGGGGSQTVVTQEPSLTVSPGGTVTLTCGSSTGAVTSGNYPNWVQQKPGQAPRGLIGGTKFLAPGTPARFSGSLLGGKAALTLSGVQPEDEAEYYCVLWYSNRWVFGGGTKLTVL

SEQ ID NO: 630 - DNA, 1512 bp, Artificial Sequence
  HD37-V LH x I2C HL
gatatccagctgacccagtctccagcttctttggctgtgtctctagggcagagggccaccatctcctgcaaggccagccaaagtgttgattatgatggtgtcagttatttgaactggtaccaacagattccaggacagccacccaaactcctcatctatgatgcatccaatctagtttctgggatcccacccaggtttagtggcagtgggtctgggacagacttcaccctcaacatccatcctgtggagaaggtggatgctgcaacctatcactgtcagcaaagtactgaggatccgtggacgttcggtggagggaccaagctcgagatcaaaggtggtggtggttctggcggcggcggctccggtggtggtggttctcaggtgcagctgcagcagtctggggctgagctggtgaggcctgggtcctcagtgaagatttcctgcaaggcttctggctatgcattcagtagctactggatgaactgggtgaagcagaggcctggacagggtcttgagtggattggacagatttggcctggagatggtgatactaactacaatggaaagttcaagggtaaagccactctgactgcagacgaatcctccagcacagcctacatgcaactcagcagcctagcatctgaggactctgcggtctatttctgtgcaagacgggagactacgacggtaggccgttattactatgctatggactactggggccaagggaccacggtcaccgtctcctccggaggtggtggatccgaggtgcagctggtcgagtctggaggaggattggtgcagcctggagggtcattgaaactctcatgtgcagcctctggattcaccttcaataagtacgccatgaactgggtccgccaggctccaggaaagggtttggaatgggttgctcgcataagaagtaaatataataattatgcaacatattatgccgattcagtgaaagacaggttcaccatctccagagatgattcaaaaaacactgcctatctacaaatgaacaacttgaaaactgaggacactgccgtgtactactgtgtgagacatgggaacttcggtaatagctacatatcctactgggcttactggggccaagggactctggtcaccgtctcctcaggtggtggtggttctggcggcggcggctccggtggtggtggttctcagactgttgtgactcaggaaccttcactcaccgtatcacctggtggaacagtcacactcacttgtggctcctcgactggggctgttacatctggcaactacccaaactgggtccaacaaaaaccaggtcaggcaccccgtggtctaataggtgggactaagttcctcgcccccggtactcctgccagattctcaggctccctgcttggaggcaaggctgccctcaccctctcaggggtacagccagaggatgaggcagaatattactgtgttctatggtacagcaaccgctgggtgttcggtggaggaaccaaactgactgtccta

SEQ ID NO: 631 - protein, 111 aa, Artificial Sequence
  HD37-E L
DIQLTQSPASLAVSLGQRATISCKASQSVDYDGESYLNWYQQIPGQPPKLLIYDASNLVSGIPPRFSGSGSGTDFTLNIHPVEKVDAATYHCQQSTEDPWTFGGGTKLEIK

SEQ ID NO: 632 - DNA, 333 bp, Artificial Sequence
  HD37-E L
gatatccagctgacccagtctccagcttctttggctgtgtctctagggcagagggccaccatctcctgcaaggccagccaaagtgttgattatgatggtgagagttatttgaactggtaccaacagattccaggacagccacccaaactcctcatctatgatgcatccaatctagtttctgggatcccacccaggtttagtggcagtgggtctgggacagacttcaccctcaacatccatcctgtggagaaggtggatgctgcaacctatcactgtcagcaaagtactgaggatccgtggacgttcggtggagggaccaagctcgagatcaaa

SEQ ID NO: 633 - protein, 15 aa, Artificial Sequence
  HD37-E LCDR1
KASQSVDYDGESYLN

SEQ ID NO: 634 - protein, 7 aa, Artificial Sequence
  HD37-E LCDR2
DASNLVS

SEQ ID NO: 635 - protein, 9 aa, Artificial Sequence
  HD37-E LCDR3
QQSTEDPWT

SEQ ID NO: 636 - protein, 124 aa, Artificial Sequence; identical to SEQ ID NO: 476
  HD37-E H

SEQ ID NO: 637 - DNA, 372 bp, Artificial Sequence; identical to SEQ ID NO: 477
  HD37-E H

SEQ ID NO: 638 - protein, 5 aa, Artificial Sequence
  HD37-E HCDR1
SYWMN

SEQ ID NO: 639 - protein, 17 aa, Artificial Sequence
  HD37-E HCDR2
QIWPGDGDTNYNGKFKG

SEQ ID NO: 640 - protein, 15 aa, Artificial Sequence
  HD37-E HCDR3
RETTTVGRYYYAMDY

SEQ ID NO: 641 - protein, 504 aa, Artificial Sequence
  HD37-E LH x I2C HL
DIQLTQSPASLAVSLGQRATISCKASQSVDYDGESYLNWYQQIPGQPPKLLIYDASNLVSGIPPRFSGSGSGTDFTLNIHPVEKVDAATYHCQQSTEDPWTFGGGTKLEIKGGGGSGGGGSGGGGSQVQLQQSGAELVRPGSSVKISCKASGYAFSSYWMNWVKQRPGQGLEWIGQIWPGDGDTNYNGKFKGKATLTADESSSTAYMQLSSLASEDSAVYFCARRETTTVGRYYYAMDYWGQGTTVTVSSGGGGSEVQLVESGGGLVQPGGSLKLSCAASGFTFNKYAMNWVRQAPGKGLEWVARIRSKYNNYATYYADSVKDRFTISRDDSKNTAYLQMNNLKTEDTAVYYCVRHGNFGNSYISYWAYWGQGTLVTVSSGGGGSGGGGSGGGGSQTVVTQEPSLTVSPGGTVTLTCGSSTGAVTSGNYPNWVQQKPGQAPRGLIGGTKFLAPGTPARFSGSLLGGKAALTLSGVQPEDEAEYYCVLWYSNRWVFGGGTKLTVL

SEQ ID NO: 642 - DNA, 1512 bp, Artificial Sequence
  HD37-E LH x I2C HL
gatatccagctgacccagtctccagcttctttggctgtgtctctagggcagagggccaccatctcctgcaaggccagccaaagtgttgattatgatggtgagagttatttgaactggtaccaacagattccaggacagccacccaaactcctcatctatgatgcatccaatctagtttctgggatcccacccaggtttagtggcagtgggtctgggacagacttcaccctcaacatccatcctgtggagaaggtggatgctgcaacctatcactgtcagcaaagtactgaggatccgtggacgttcggtggagggaccaagctcgagatcaaaggtggtggtggttctggcggcggcggctccggtggtggtggttctcaggtgcagctgcagcagtctggggctgagctggtgaggcctgggtcctcagtgaagatttcctgcaaggcttctggctatgcattcagtagctactggatgaactgggtgaagcagaggcctggacagggtcttgagtggattggacagatttggcctggagatggtgatactaactacaatggaaagttcaagggtaaagccactctgactgcagacgaatcctccagcacagcctacatgcaactcagcagcctagcatctgaggactctgcggtctatttctgtgcaagacgggagactacgacggtaggccgttattactatgctatggactactggggccaagggaccacggtcaccgtctcctccggaggtggtggatccgaggtgcagctggtcgagtctggaggaggattggtgcagcctggagggtcattgaaactctcatgtgcagcctctggattcaccttcaataagtacgccatgaactgggtccgccaggctccaggaaagggtttggaatgggttgctcgcataagaagtaaatataataattatgcaacatattatgccgattcagtgaaagacaggttcaccatctccagagatgattcaaaaaacactgcctatctacaaatgaacaacttgaaaactgaggacactgccgtgtactactgtgtgagacatgggaacttcggtaatagctacatatcctactgggcttactggggccaagggactctggtcaccgtctcctcaggtggtggtggttctggcggcggcggctccggtggtggtggttctcagactgttgtgactcaggaaccttcactcaccgtatcacctggtggaacagtcacactcacttgtggctcctcgactggggctgttacatctggcaactacccaaactgggtccaacaaaaaccaggtcaggcaccccgtggtctaataggtgggactaagttcctcgcccccggtactcctgccagattctcaggctccctgcttggaggcaaggctgccctcaccctctcaggggtacagccagaggatgaggcagaatattactgtgttctatggtacagcaaccgctgggtgttcggtggaggaaccaaactgactgtccta

SEQ ID NO: 643 - protein, 111 aa, Artificial Sequence
  HD37-Q L
DIQLTQSPASLAVSLGQRATISCKASQSVDYDGQSYLNWYQQIPGQPPKLLIYDASNLVSGIPPRFSGSGSGTDFTLNIHPVEKVDAATYHCQQSTEDPWTFGGGTKLEIK

SEQ ID NO: 644 - DNA, 333 bp, Artificial Sequence
  HD37-Q L
gatatccagctgacccagtctccagcttctttggctgtgtctctagggcagagggccaccatctcctgcaaggccagccaaagtgttgattatgatggtcagagttatttgaactggtaccaacagattccaggacagccacccaaactcctcatctatgatgcatccaatctagtttctgggatcccacccaggtttagtggcagtgggtctgggacagacttcaccctcaacatccatcctgtggagaaggtggatgctgcaacctatcactgtcagcaaagtactgaggatccgtggacgttcggtggagggaccaagctcgagatcaaa

SEQ ID NO: 645 - protein, 15 aa, Artificial Sequence
  HD37-Q LCDR1
KASQSVDYDGQSYLN

SEQ ID NO: 646 - protein, 7 aa, Artificial Sequence
  HD37-Q LCDR2
DASNLVS

SEQ ID NO: 647 - protein, 9 aa, Artificial Sequence
  HD37-Q LCDR3
QQSTEDPWT

SEQ ID NO: 648 - protein, 124 aa, Artificial Sequence; identical to SEQ ID NO: 476
  HD37-Q H

SEQ ID NO: 649 - DNA, 372 bp, Artificial Sequence; identical to SEQ ID NO: 477
  HD37-Q H

SEQ ID NO: 650 - protein, 5 aa, Artificial Sequence
  HD37-Q HCDR1
SYWMN

SEQ ID NO: 651 - protein, 17 aa, Artificial Sequence
  HD37-Q HCDR2
QIWPGDGDTNYNGKFKG

SEQ ID NO: 652 - protein, 15 aa, Artificial Sequence
  HD37-Q HCDR3
RETTTVGRYYYAMDY

SEQ ID NO: 653 - protein, 504 aa, Artificial Sequence
  HD37-Q LH x I2C HL
DIQLTQSPASLAVSLGQRATISCKASQSVDYDGQSYLNWYQQIPGQPPKLLIYDASNLVSGIPPRFSGSGSGTDFTLNIHPVEKVDAATYHCQQSTEDPWTFGGGTKLEIKGGGGSGGGGSGGGGSQVQLQQSGAELVRPGSSVKISCKASGYAFSSYWMNWVKQRPGQGLEWIGQIWPGDGDTNYNGKFKGKATLTADESSSTAYMQLSSLASEDSAVYFCARRETTTVGRYYYAMDYWGQGTTVTVSSGGGGSEVQLVESGGGLVQPGGSLKLSCAASGFTFNKYAMNWVRQAPGKGLEWVARIRSKYNNYATYYADSVKDRFTISRDDSKNTAYLQMNNLKTEDTAVYYCVRHGNFGNSYISYWAYWGQGTLVTVSSGGGGSGGGGSGGGGSQTVVTQEPSLTVSPGGTVTLTCGSSTGAVTSGNYPNWVQQKPGQAPRGLIGGTKFLAPGTPARFSGSLLGGKAALTLSGVQPEDEAEYYCVLWYSNRWVFGGGTKLTVL

SEQ ID NO: 654 - DNA, 1512 bp, Artificial Sequence
  HD37-Q LH x I2C HL
gatatccagctgacccagtctccagcttctttggctgtgtctctagggcagagggccaccatctcctgcaaggccagccaaagtgttgattatgatggtcagagttatttgaactggtaccaacagattccaggacagccacccaaactcctcatctatgatgcatccaatctagtttctgggatcccacccaggtttagtggcagtgggtctgggacagacttcaccctcaacatccatcctgtggagaaggtggatgctgcaacctatcactgtcagcaaagtactgaggatccgtggacgttcggtggagggaccaagctcgagatcaaaggtggtggtggttctggcggcggcggctccggtggtggtggttctcaggtgcagctgcagcagtctggggctgagctggtgaggcctgggtcctcagtgaagatttcctgcaaggcttctggctatgcattcagtagctactggatgaactgggtgaagcagaggcctggacagggtcttgagtggattggacagatttggcctggagatggtgatactaactacaatggaaagttcaagggtaaagccactctgactgcagacgaatcctccagcacagcctacatgcaactcagcagcctagcatctgaggactctgcggtctatttctgtgcaagacgggagactacgacggtaggccgttattactatgctatggactactggggccaagggaccacggtcaccgtctcctccggaggtggtggatccgaggtgcagctggtcgagtctggaggaggattggtgcagcctggagggtcattgaaactctcatgtgcagcctctggattcaccttcaataagtacgccatgaactgggtccgccaggctccaggaaagggtttggaatgggttgctcgcataagaagtaaatataataattatgcaacatattatgccgattcagtgaaagacaggttcaccatctccagagatgattcaaaaaacactgcctatctacaaatgaacaacttgaaaactgaggacactgccgtgtactactgtgtgagacatgggaacttcggtaatagctacatatcctactgggcttactggggccaagggactctggtcaccgtctcctcaggtggtggtggttctggcggcggcggctccggtggtggtggttctcagactgttgtgactcaggaaccttcactcaccgtatcacctggtggaacagtcacactcacttgtggctcctcgactggggctgttacatctggcaactacccaaactgggtccaacaaaaaccaggtcaggcaccccgtggtctaataggtgggactaagttcctcgcccccggtactcctgccagattctcaggctccctgcttggaggcaaggctgccctcaccctctcaggggtacagccagaggatgaggcagaatattactgtgttctatggtacagcaaccgctgggtgttcggtggaggaaccaaactgactgtccta

SEQ ID NO: 655 - protein, 111 aa, Artificial Sequence
  HD37-N L
DIQLTQSPASLAVSLGQRATISCKASQSVDYDGNSYLNWYQQIPGQPPKLLIYDASNLVSGIPPRFSGSGSGTDFTLNIHPVEKVDAATYHCQQSTEDPWTFGGGTKLEIK

SEQ ID NO: 656 - DNA, 333 bp, Artificial Sequence
  HD37-N L
gatatccagctgacccagtctccagcttctttggctgtgtctctagggcagagggccaccatctcctgcaaggccagccaaagtgttgattatgatggtaacagttatttgaactggtaccaacagattccaggacagccacccaaactcctcatctatgatgcatccaatctagtttctgggatcccacccaggtttagtggcagtgggtctgggacagacttcaccctcaacatccatcctgtggagaaggtggatgctgcaacctatcactgtcagcaaagtactgaggatccgtggacgttcggtggagggaccaagctcgagatcaaa

SEQ ID NO: 657 - protein, 15 aa, Artificial Sequence
  HD37-N LCDR1
KASQSVDYDGNSYLN

SEQ ID NO: 658 - protein, 7 aa, Artificial Sequence
  HD37-N LCDR2
DASNLVS

SEQ ID NO: 659 - protein, 9 aa, Artificial Sequence
  HD37-N LCDR3
QQSTEDPWT

SEQ ID NO: 660 - protein, 124 aa, Artificial Sequence; identical to SEQ ID NO: 476
  HD37-N H

SEQ ID NO: 661 - DNA, 372 bp, Artificial Sequence; identical to SEQ ID NO: 477
  HD37-N H

SEQ ID NO: 662 - protein, 5 aa, Artificial Sequence
  HD37-N HCDR1
SYWMN

SEQ ID NO: 663 - protein, 17 aa, Artificial Sequence
  HD37-N HCDR2
QIWPGDGDTNYNGKFKG

SEQ ID NO: 664 - protein, 15 aa, Artificial Sequence
  HD37-N HCDR3
RETTTVGRYYYAMDY

SEQ ID NO: 665 - protein, 504 aa, Artificial Sequence
  HD37-N LH x I2C HL
DIQLTQSPASLAVSLGQRATISCKASQSVDYDGNSYLNWYQQIPGQPPKLLIYDASNLVSGIPPRFSGSGSGTDFTLNIHPVEKVDAATYHCQQSTEDPWTFGGGTKLEIKGGGGSGGGGSGGGGSQVQLQQSGAELVRPGSSVKISCKASGYAFSSYWMNWVKQRPGQGLEWIGQIWPGDGDTNYNGKFKGKATLTADESSSTAYMQLSSLASEDSAVYFCARRETTTVGRYYYAMDYWGQGTTVTVSSGGGGSEVQLVESGGGLVQPGGSLKLSCAASGFTFNKYAMNWVRQAPGKGLEWVARIRSKYNNYATYYADSVKDRFTISRDDSKNTAYLQMNNLKTEDTAVYYCVRHGNFGNSYISYWAYWGQGTLVTVSSGGGGSGGGGSGGGGSQTVVTQEPSLTVSPGGTVTLTCGSSTGAVTSGNYPNWVQQKPGQAPRGLIGGTKFLAPGTPARFSGSLLGGKAALTLSGVQPEDEAEYYCVLWYSNRWVFGGGTKLTVL

SEQ ID NO: 666 - DNA, 1512 bp, Artificial Sequence
  HD37-N LH x I2C HL
gatatccagctgacccagtctccagcttctttggctgtgtctctagggcagagggccaccatctcctgcaaggccagccaaagtgttgattatgatggtaacagttatttgaactggtaccaacagattccaggacagccacccaaactcctcatctatgatgcatccaatctagtttctgggatcccacccaggtttagtggcagtgggtctgggacagacttcaccctcaacatccatcctgtggagaaggtggatgctgcaacctatcactgtcagcaaagtactgaggatccgtggacgttcggtggagggaccaagctcgagatcaaaggtggtggtggttctggcggcggcggctccggtggtggtggttctcaggtgcagctgcagcagtctggggctgagctggtgaggcctgggtcctcagtgaagatttcctgcaaggcttctggctatgcattcagtagctactggatgaactgggtgaagcagaggcctggacagggtcttgagtggattggacagatttggcctggagatggtgatactaactacaatggaaagttcaagggtaaagccactctgactgcagacgaatcctccagcacagcctacatgcaactcagcagcctagcatctgaggactctgcggtctatttctgtgcaagacgggagactacgacggtaggccgttattactatgctatggactactggggccaagggaccacggtcaccgtctcctccggaggtggtggatccgaggtgcagctggtcgagtctggaggaggattggtgcagcctggagggtcattgaaactctcatgtgcagcctctggattcaccttcaataagtacgccatgaactgggtccgccaggctccaggaaagggtttggaatgggttgctcgcataagaagtaaatataataattatgcaacatattatgccgattcagtgaaagacaggttcaccatctccagagatgattcaaaaaacactgcctatctacaaatgaacaacttgaaaactgaggacactgccgtgtactactgtgtgagacatgggaacttcggtaatagctacatatcctactgggcttactggggccaagggactctggtcaccgtctcctcaggtggtggtggttctggcggcggcggctccggtggtggtggttctcagactgttgtgactcaggaaccttcactcaccgtatcacctggtggaacagtcacactcacttgtggctcctcgactggggctgttacatctggcaactacccaaactgggtccaacaaaaaccaggtcaggcaccccgtggtctaataggtgggactaagttcctcgcccccggtactcctgccagattctcaggctccctgcttggaggcaaggctgccctcaccctctcaggggtacagccagaggatgaggcagaatattactgtgttctatggtacagcaaccgctgggtgttcggtggaggaaccaaactgactgtccta

SEQ ID NO: 667 - protein, 111 aa, Artificial Sequence
  HD37-K L
DIQLTQSPASLAVSLGQRATISCKASQSVDYDGKSYLNWYQQIPGQPPKLLIYDASNLVSGIPPRFSGSGSGTDFTLNIHPVEKVDAATYHCQQSTEDPWTFGGGTKLEIK

SEQ ID NO: 668 - DNA, 333 bp, Artificial Sequence
  HD37-K L
gatatccagctgacccagtctccagcttctttggctgtgtctctagggcagagggccaccatctcctgcaaggccagccaaagtgttgattatgatggtaagagttatttgaactggtaccaacagattccaggacagccacccaaactcctcatctatgatgcatccaatctagtttctgggatcccacccaggtttagtggcagtgggtctgggacagacttcaccctcaacatccatcctgtggagaaggtggatgctgcaacctatcactgtcagcaaagtactgaggatccgtggacgttcggtggagggaccaagctcgagatcaaa

SEQ ID NO: 669 - protein, 15 aa, Artificial Sequence
  HD37-K LCDR1
KASQSVDYDGKSYLN

SEQ ID NO: 670 - protein, 7 aa, Artificial Sequence
  HD37-K LCDR2
DASNLVS

SEQ ID NO: 671 - protein, 9 aa, Artificial Sequence
  HD37-K LCDR3
QQSTEDPWT

SEQ ID NO: 672 - protein, 124 aa, Artificial Sequence; identical to SEQ ID NO: 476
  HD37-K H

SEQ ID NO: 673 - DNA, 372 bp, Artificial Sequence; identical to SEQ ID NO: 477
  HD37-K H

SEQ ID NO: 674 - protein, 5 aa, Artificial Sequence
  HD37-K HCDR1
SYWMN

SEQ ID NO: 675 - protein, 17 aa, Artificial Sequence
  HD37-K HCDR2
QIWPGDGDTNYNGKFKG

SEQ ID NO: 676 - protein, 15 aa, Artificial Sequence
  HD37-K HCDR3
RETTTVGRYYYAMDY

SEQ ID NO: 677 - protein, 504 aa, Artificial Sequence
  HD37-K LH x I2C HL
DIQLTQSPASLAVSLGQRATISCKASQSVDYDGKSYLNWYQQIPGQPPKLLIYDASNLVSGIPPRFSGSGSGTDFTLNIHPVEKVDAATYHCQQSTEDPWTFGGGTKLEIKGGGGSGGGGSGGGGSQVQLQQSGAELVRPGSSVKISCKASGYAFSSYWMNWVKQRPGQGLEWIGQIWPGDGDTNYNGKFKGKATLTADESSSTAYMQLSSLASEDSAVYFCARRETTTVGRYYYAMDYWGQGTTVTVSSGGGGSEVQLVESGGGLVQPGGSLKLSCAASGFTFNKYAMNWVRQAPGKGLEWVARIRSKYNNYATYYADSVKDRFTISRDDSKNTAYLQMNNLKTEDTAVYYCVRHGNFGNSYISYWAYWGQGTLVTVSSGGGGSGGGGSGGGGSQTVVTQEPSLTVSPGGTVTLTCGSSTGAVTSGNYPNWVQQKPGQAPRGLIGGTKFLAPGTPARFSGSLLGGKAALTLSGVQPEDEAEYYCVLWYSNRWVFGGGTKLTVL

SEQ ID NO: 678 - DNA, 1512 bp, Artificial Sequence
  HD37-K LH x I2C HL
gatatccagctgacccagtctccagcttctttggctgtgtctctagggcagagggccaccatctcctgcaaggccagccaaagtgttgattatgatggtaagagttatttgaactggtaccaacagattccaggacagccacccaaactcctcatctatgatgcatccaatctagtttctgggatcccacccaggtttagtggcagtgggtctgggacagacttcaccctcaacatccatcctgtggagaaggtggatgctgcaacctatcactgtcagcaaagtactgaggatccgtggacgttcggtggagggaccaagctcgagatcaaaggtggtggtggttctggcggcggcggctccggtggtggtggttctcaggtgcagctgcagcagtctggggctgagctggtgaggcctgggtcctcagtgaagatttcctgcaaggcttctggctatgcattcagtagctactggatgaactgggtgaagcagaggcctggacagggtcttgagtggattggacagatttggcctggagatggtgatactaactacaatggaaagttcaagggtaaagccactctgactgcagacgaatcctccagcacagcctacatgcaactcagcagcctagcatctgaggactctgcggtctatttctgtgcaagacgggagactacgacggtaggccgttattactatgctatggactactggggccaagggaccacggtcaccgtctcctccggaggtggtggatccgaggtgcagctggtcgagtctggaggaggattggtgcagcctggagggtcattgaaactctcatgtgcagcctctggattcaccttcaataagtacgccatgaactgggtccgccaggctccaggaaagggtttggaatgggttgctcgcataagaagtaaatataataattatgcaacatattatgccgattcagtgaaagacaggttcaccatctccagagatgattcaaaaaacactgcctatctacaaatgaacaacttgaaaactgaggacactgccgtgtactactgtgtgagacatgggaacttcggtaatagctacatatcctactgggcttactggggccaagggactctggtcaccgtctcctcaggtggtggtggttctggcggcggcggctccggtggtggtggttctcagactgttgtgactcaggaaccttcactcaccgtatcacctggtggaacagtcacactcacttgtggctcctcgactggggctgttacatctggcaactacccaaactgggtccaacaaaaaccaggtcaggcaccccgtggtctaataggtgggactaagttcctcgcccccggtactcctgccagattctcaggctccctgcttggaggcaaggctgccctcaccctctcaggggtacagccagaggatgaggcagaatattactgtgttctatggtacagcaaccgctgggtgttcggtggaggaaccaaactgactgtccta

SEQ ID NO: 679 - protein, 111 aa, Artificial Sequence
  HD37-R L
DIQLTQSPASLAVSLGQRATISCKASQSVDYDGRSYLNWYQQIPGQPPKLLIYDASNLVSGIPPRFSGSGSGTDFTLNIHPVEKVDAATYHCQQSTEDPWTFGGGTKLEIK

SEQ ID NO: 680 - DNA, 333 bp, Artificial Sequence
  HD37-R L
gatatccagctgacccagtctccagcttctttggctgtgtctctagggcagagggccaccatctcctgcaaggccagccaaagtgttgattatgatggtcgtagttatttgaactggtaccaacagattccaggacagccacccaaactcctcatctatgatgcatccaatctagtttctgggatcccacccaggtttagtggcagtgggtctgggacagacttcaccctcaacatccatcctgtggagaaggtggatgctgcaacctatcactgtcagcaaagtactgaggatccgtggacgttcggtggagggaccaagctcgagatcaaa

SEQ ID NO: 681 - protein, 15 aa, Artificial Sequence
  HD37-R LCDR1
KASQSVDYDGRSYLN

SEQ ID NO: 682 - protein, 7 aa, Artificial Sequence
  HD37-R LCDR2
DASNLVS

SEQ ID NO: 683 - protein, 9 aa, Artificial Sequence
  HD37-R LCDR3
QQSTEDPWT

SEQ ID NO: 684 - protein, 124 aa, Artificial Sequence; identical to SEQ ID NO: 476
  HD37-R H

SEQ ID NO: 685 - DNA, 372 bp, Artificial Sequence; identical to SEQ ID NO: 477
  HD37-R H

SEQ ID NO: 686 - protein, 5 aa, Artificial Sequence
  HD37-R HCDR1
SYWMN

SEQ ID NO: 687 - protein, 17 aa, Artificial Sequence
  HD37-R HCDR2
QIWPGDGDTNYNGKFKG

SEQ ID NO: 688 - protein, 15 aa, Artificial Sequence
  HD37-R HCDR3
RETTTVGRYYYAMDY

SEQ ID NO: 689 - protein, 504 aa, Artificial Sequence
  HD37-R LH x I2C HL
DIQLTQSPASLAVSLGQRATISCKASQSVDYDGRSYLNWYQQIPGQPPKLLIYDASNLVSGIPPRFSGSGSGTDFTLNIHPVEKVDAATYHCQQSTEDPWTFGGGTKLEIKGGGGSGGGGSGGGGSQVQLQQSGAELVRPGSSVKISCKASGYAFSSYWMNWVKQRPGQGLEWIGQIWPGDGDTNYNGKFKGKATLTADESSSTAYMQLSSLASEDSAVYFCARRETTTVGRYYYAMDYWGQGTTVTVSSGGGGSEVQLVESGGGLVQPGGSLKLSCAASGFTFNKYAMNWVRQAPGKGLEWVARIRSKYNNYATYYADSVKDRFTISRDDSKNTAYLQMNNLKTEDTAVYYCVRHGNFGNSYISYWAYWGQGTLVTVSSGGGGSGGGGSGGGGSQTVVTQEPSLTVSPGGTVTLTCGSSTGAVTSGNYPNWVQQKPGQAPRGLIGGTKFLAPGTPARFSGSLLGGKAALTLSGVQPEDEAEYYCVLWYSNRWVFGGGTKLTVL

SEQ ID NO: 690 - DNA, 1512 bp, Artificial Sequence
  HD37-R LH x I2C HL
gatatccagctgacccagtctccagcttctttggctgtgtctctagggcagagggccaccatctcctgcaaggccagccaaagtgttgattatgatggtcgtagttatttgaactggtaccaacagattccaggacagccacccaaactcctcatctatgatgcatccaatctagtttctgggatcccacccaggtttagtggcagtgggtctgggacagacttcaccctcaacatccatcctgtggagaaggtggatgctgcaacctatcactgtcagcaaagtactgaggatccgtggacgttcggtggagggaccaagctcgagatcaaaggtggtggtggttctggcggcggcggctccggtggtggtggttctcaggtgcagctgcagcagtctggggctgagctggtgaggcctgggtcctcagtgaagatttcctgcaaggcttctggctatgcattcagtagctactggatgaactgggtgaagcagaggcctggacagggtcttgagtggattggacagatttggcctggagatggtgatactaactacaatggaaagttcaagggtaaagccactctgactgcagacgaatcctccagcacagcctacatgcaactcagcagcctagcatctgaggactctgcggtctatttctgtgcaagacgggagactacgacggtaggccgttattactatgctatggactactggggccaagggaccacggtcaccgtctcctccggaggtggtggatccgaggtgcagctggtcgagtctggaggaggattggtgcagcctggagggtcattgaaactctcatgtgcagcctctggattcaccttcaataagtacgccatgaactgggtccgccaggctccaggaaagggtttggaatgggttgctcgcataagaagtaaatataataattatgcaacatattatgccgattcagtgaaagacaggttcaccatctccagagatgattcaaaaaacactgcctatctacaaatgaacaacttgaaaactgaggacactgccgtgtactactgtgtgagacatgggaacttcggtaatagctacatatcctactgggcttactggggccaagggactctggtcaccgtctcctcaggtggtggtggttctggcggcggcggctccggtggtggtggttctcagactgttgtgactcaggaaccttcactcaccgtatcacctggtggaacagtcacactcacttgtggctcctcgactggggctgttacatctggcaactacccaaactgggtccaacaaaaaccaggtcaggcaccccgtggtctaataggtgggactaagttcctcgcccccggtactcctgccagattctcaggctccctgcttggaggcaaggctgccctcaccctctcaggggtacagccagaggatgaggcagaatattactgtgttctatggtacagcaaccgctgggtgttcggtggaggaaccaaactgactgtccta

SEQ ID NO: 691 - protein, 111 aa, Artificial Sequence
  HD37-H L
DIQLTQSPASLAVSLGQRATISCKASQSVDYDGHSYLNWYQQIPGQPPKLLIYDASNLVSGIPPRFSGSGSGTDFTLNIHPVEKVDAATYHCQQSTEDPWTFGGGTKLEIK

SEQ ID NO: 692 - DNA, 333 bp, Artificial Sequence
  HD37-H L
gatatccagctgacccagtctccagcttctttggctgtgtctctagggcagagggccaccatctcctgcaaggccagccaaagtgttgattatgatggtcacagttatttgaactggtaccaacagattccaggacagccacccaaactcctcatctatgatgcatccaatctagtttctgggatcccacccaggtttagtggcagtgggtctgggacagacttcaccctcaacatccatcctgtggagaaggtggatgctgcaacctatcactgtcagcaaagtactgaggatccgtggacgttcggtggagggaccaagctcgagatcaaa

SEQ ID NO: 693 - protein, 15 aa, Artificial Sequence
  HD37-H LCDR1
KASQSVDYDGHSYLN

SEQ ID NO: 694 - protein, 7 aa, Artificial Sequence
  HD37-H LCDR2
DASNLVS

SEQ ID NO: 695 - protein, 9 aa, Artificial Sequence
  HD37-H LCDR3
QQSTEDPWT

SEQ ID NO: 696 - protein, 124 aa, Artificial Sequence; identical to SEQ ID NO: 476
  HD37-H H

SEQ ID NO: 697 - DNA, 372 bp, Artificial Sequence; identical to SEQ ID NO: 477
  HD37-H H

SEQ ID NO: 698 - protein, 5 aa, Artificial Sequence
  HD37-H HCDR1
SYWMN

SEQ ID NO: 699 - protein, 17 aa, Artificial Sequence
  HD37-H HCDR2
QIWPGDGDTNYNGKFKG

SEQ ID NO: 700 - protein, 15 aa, Artificial Sequence
  HD37-H HCDR3
RETTTVGRYYYAMDY

SEQ ID NO: 701 - protein, 504 aa, Artificial Sequence
  HD37-H LH x I2C HL
DIQLTQSPASLAVSLGQRATISCKASQSVDYDGHSYLNWYQQIPGQPPKLLIYDASNLVSGIPPRFSGSGSGTDFTLNIHPVEKVDAATYHCQQSTEDPWTFGGGTKLEIKGGGGSGGGGSGGGGSQVQLQQSGAELVRPGSSVKISCKASGYAFSSYWMNWVKQRPGQGLEWIGQIWPGDGDTNYNGKFKGKATLTADESSSTAYMQLSSLASEDSAVYFCARRETTTVGRYYYAMDYWGQGTTVTVSSGGGGSEVQLVESGGGLVQPGGSLKLSCAASGFTFNKYAMNWVRQAPGKGLEWVARIRSKYNNYATYYADSVKDRFTISRDDSKNTAYLQMNNLKTEDTAVYYCVRHGNFGNSYISYWAYWGQGTLVTVSSGGGGSGGGGSGGGGSQTVVTQEPSLTVSPGGTVTLTCGSSTGAVTSGNYPNWVQQKPGQAPRGLIGGTKFLAPGTPARFSGSLLGGKAALTLSGVQPEDEAEYYCVLWYSNRWVFGGGTKLTVL

SEQ ID NO: 702 - DNA, 1512 bp, Artificial Sequence
  HD37-H LH x I2C HL
gatatccagctgacccagtctccagcttctttggctgtgtctctagggcagagggccaccatctcctgcaaggccagccaaagtgttgattatgatggtcacagttatttgaactggtaccaacagattccaggacagccacccaaactcctcatctatgatgcatccaatctagtttctgggatcccacccaggtttagtggcagtgggtctgggacagacttcaccctcaacatccatcctgtggagaaggtggatgctgcaacctatcactgtcagcaaagtactgaggatccgtggacgttcggtggagggaccaagctcgagatcaaaggtggtggtggttctggcggcggcggctccggtggtggtggttctcaggtgcagctgcagcagtctggggctgagctggtgaggcctgggtcctcagtgaagatttcctgcaaggcttctggctatgcattcagtagctactggatgaactgggtgaagcagaggcctggacagggtcttgagtggattggacagatttggcctggagatggtgatactaactacaatggaaagttcaagggtaaagccactctgactgcagacgaatcctccagcacagcctacatgcaactcagcagcctagcatctgaggactctgcggtctatttctgtgcaagacgggagactacgacggtaggccgttattactatgctatggactactggggccaagggaccacggtcaccgtctcctccggaggtggtggatccgaggtgcagctggtcgagtctggaggaggattggtgcagcctggagggtcattgaaactctcatgtgcagcctctggattcaccttcaataagtacgccatgaactgggtccgccaggctccaggaaagggtttggaatgggttgctcgcataagaagtaaatataataattatgcaacatattatgccgattcagtgaaagacaggttcaccatctccagagatgattcaaaaaacactgcctatctacaaatgaacaacttgaaaactgaggacactgccgtgtactactgtgtgagacatgggaacttcggtaatagctacatatcctactgggcttactggggccaagggactctggtcaccgtctcctcaggtggtggtggttctggcggcggcggctccggtggtggtggttctcagactgttgtgactcaggaaccttcactcaccgtatcacctggtggaacagtcacactcacttgtggctcctcgactggggctgttacatctggcaactacccaaactgggtccaacaaaaaccaggtcaggcaccccgtggtctaataggtgggactaagttcctcgcccccggtactcctgccagattctcaggctccctgcttggaggcaaggctgccctcaccctctcaggggtacagccagaggatgaggcagaatattactgtgttctatggtacagcaaccgctgggtgttcggtggaggaaccaaactgactgtccta

SEQ ID NO: 703 - protein, 111 aa, Artificial Sequence
  HD37-Y L
DIQLTQSPASLAVSLGQRATISCKASQSVDYDGYSYLNWYQQIPGQPPKLLIYDASNLVSGIPPRFSGSGSGTDFTLNIHPVEKVDAATYHCQQSTEDPWTFGGGTKLEIK

SEQ ID NO: 704 - DNA, 333 bp, Artificial Sequence
  HD37-Y L
gatatccagctgacccagtctccagcttctttggctgtgtctctagggcagagggccaccatctcctgcaaggccagccaaagtgttgattatgatggttacagttatttgaactggtaccaacagattccaggacagccacccaaactcctcatctatgatgcatccaatctagtttctgggatcccacccaggtttagtggcagtgggtctgggacagacttcaccctcaacatccatcctgtggagaaggtggatgctgcaacctatcactgtcagcaaagtactgaggatccgtggacgttcggtggagggaccaagctcgagatcaaa

SEQ ID NO: 705 - protein, 15 aa, Artificial Sequence
  HD37-Y LCDR1
KASQSVDYDGYSYLN

SEQ ID NO: 706 - protein, 7 aa, Artificial Sequence
  HD37-Y LCDR2
DASNLVS

SEQ ID NO: 707 - protein, 9 aa, Artificial Sequence
  HD37-Y LCDR3
QQSTEDPWT

SEQ ID NO: 708 - protein, 124 aa, Artificial Sequence; identical to SEQ ID NO: 476
  HD37-Y H

SEQ ID NO: 709 - DNA, 372 bp, Artificial Sequence; identical to SEQ ID NO: 477
  HD37-Y H

SEQ ID NO: 710 - protein, 5 aa, Artificial Sequence
  HD37-Y HCDR1
SYWMN

SEQ ID NO: 711 - protein, 17 aa, Artificial Sequence
  HD37-Y HCDR2
QIWPGDGDTNYNGKFKG

SEQ ID NO: 712 - protein, 15 aa, Artificial Sequence
  HD37-Y HCDR3
RETTTVGRYYYAMDY

SEQ ID NO: 713 - protein, 504 aa, Artificial Sequence
  HD37-Y LH x I2C HL
DIQLTQSPASLAVSLGQRATISCKASQSVDYDGYSYLNWYQQIPGQPPKLLIYDASNLVSGIPPRFSGSGSGTDFTLNIHPVEKVDAATYHCQQSTEDPWTFGGGTKLEIKGGGGSGGGGSGGGGSQVQLQQSGAELVRPGSSVKISCKASGYAFSSYWMNWVKQRPGQGLEWIGQIWPGDGDTNYNGKFKGKATLTADESSSTAYMQLSSLASEDSAVYFCARRETTTVGRYYYAMDYWGQGTTVTVSSGGGGSEVQLVESGGGLVQPGGSLKLSCAASGFTFNKYAMNWVRQAPGKGLEWVARIRSKYNNYATYYADSVKDRFTISRDDSKNTAYLQMNNLKTEDTAVYYCVRHGNFGNSYISYWAYWGQGTLVTVSSGGGGSGGGGSGGGGSQTVVTQEPSLTVSPGGTVTLTCGSSTGAVTSGNYPNWVQQKPGQAPRGLIGGTKFLAPGTPARFSGSLLGGKAALTLSGVQPEDEAEYYCVLWYSNRWVFGGGTKLTVL

SEQ ID NO: 714 - DNA, 1512 bp, Artificial Sequence
  HD37-Y LH x I2C HL
gatatccagctgacccagtctccagcttctttggctgtgtctctagggcagagggccaccatctcctgcaaggccagccaaagtgttgattatgatggttacagttatttgaactggtaccaacagattccaggacagccacccaaactcctcatctatgatgcatccaatctagtttctgggatcccacccaggtttagtggcagtgggtctgggacagacttcaccctcaacatccatcctgtggagaaggtggatgctgcaacctatcactgtcagcaaagtactgaggatccgtggacgttcggtggagggaccaagctcgagatcaaaggtggtggtggttctggcggcggcggctccggtggtggtggttctcaggtgcagctgcagcagtctggggctgagctggtgaggcctgggtcctcagtgaagatttcctgcaaggcttctggctatgcattcagtagctactggatgaactgggtgaagcagaggcctggacagggtcttgagtggattggacagatttggcctggagatggtgatactaactacaatggaaagttcaagggtaaagccactctgactgcagacgaatcctccagcacagcctacatgcaactcagcagcctagcatctgaggactctgcggtctatttctgtgcaagacgggagactacgacggtaggccgttattactatgctatggactactggggccaagggaccacggtcaccgtctcctccggaggtggtggatccgaggtgcagctggtcgagtctggaggaggattggtgcagcctggagggtcattgaaactctcatgtgcagcctctggattcaccttcaataagtacgccatgaactgggtccgccaggctccaggaaagggtttggaatgggttgctcgcataagaagtaaatataataattatgcaacatattatgccgattcagtgaaagacaggttcaccatctccagagatgattcaaaaaacactgcctatctacaaatgaacaacttgaaaactgaggacactgccgtgtactactgtgtgagacatgggaacttcggtaatagctacatatcctactgggcttactggggccaagggactctggtcaccgtctcctcaggtggtggtggttctggcggcggcggctccggtggtggtggttctcagactgttgtgactcaggaaccttcactcaccgtatcacctggtggaacagtcacactcacttgtggctcctcgactggggctgttacatctggcaactacccaaactgggtccaacaaaaaccaggtcaggcaccccgtggtctaataggtgggactaagttcctcgcccccggtactcctgccagattctcaggctccctgcttggaggcaaggctgccctcaccctctcaggggtacagccagaggatgaggcagaatattactgtgttctatggtacagcaaccgctgggtgttcggtggaggaaccaaactgactgtccta

SEQ ID NO: 715 - protein, 111 aa, Artificial Sequence
  HD37-P L
DIQLTQSPASLAVSLGQRATISCKASQSVDYDGPSYLNWYQQIPGQPPKLLIYDASNLVSGIPPRFSGSGSGTDFTLNIHPVEKVDAATYHCQQSTEDPWTFGGGTKLEIK

SEQ ID NO: 716 - DNA, 333 bp, Artificial Sequence
  HD37-P L
gatatccagctgacccagtctccagcttctttggctgtgtctctagggcagagggccaccatctcctgcaaggccagccaaagtgttgattatgatggtccaagttatttgaactggtaccaacagattccaggacagccacccaaactcctcatctatgatgcatccaatctagtttctgggatcccacccaggtttagtggcagtgggtctgggacagacttcaccctcaacatccatcctgtggagaaggtggatgctgcaacctatcactgtcagcaaagtactgaggatccgtggacgttcggtggagggaccaagctcgagatcaaa

SEQ ID NO: 717 - protein, 15 aa, Artificial Sequence
  HD37-P LCDR1
KASQSVDYDGPSYLN

SEQ ID NO: 718 - protein, 7 aa, Artificial Sequence
  HD37-P LCDR2
DASNLVS

SEQ ID NO: 719 - protein, 9 aa, Artificial Sequence
  HD37-P LCDR3
QQSTEDPWT

SEQ ID NO: 720 - protein, 124 aa, Artificial Sequence; identical to SEQ ID NO: 476
  HD37-P H

SEQ ID NO: 721 - DNA, 372 bp, Artificial Sequence; identical to SEQ ID NO: 477
  HD37-P H

SEQ ID NO: 722 - protein, 5 aa, Artificial Sequence
  HD37-P HCDR1
SYWMN

SEQ ID NO: 723 - protein, 17 aa, Artificial Sequence
  HD37-P HCDR2
QIWPGDGDTNYNGKFKG

SEQ ID NO: 724 - protein, 15 aa, Artificial Sequence
  HD37-P HCDR3
RETTTVGRYYYAMDY

SEQ ID NO: 725 - protein, 504 aa, Artificial Sequence
  HD37-P LH x I2C HL
DIQLTQSPASLAVSLGQRATISCKASQSVDYDGPSYLNWYQQIPGQPPKLLIYDASNLVSGIPPRFSGSGSGTDFTLNIHPVEKVDAATYHCQQSTEDPWTFGGGTKLEIKGGGGSGGGGSGGGGSQVQLQQSGAELVRPGSSVKISCKASGYAFSSYWMNWVKQRPGQGLEWIGQIWPGDGDTNYNGKFKGKATLTADESSSTAYMQLSSLASEDSAVYFCARRETTTVGRYYYAMDYWGQGTTVTVSSGGGGSEVQLVESGGGLVQPGGSLKLSCAASGFTFNKYAMNWVRQAPGKGLEWVARIRSKYNNYATYYADSVKDRFTISRDDSKNTAYLQMNNLKTEDTAVYYCVRHGNFGNSYISYWAYWGQGTLVTVSSGGGGSGGGGSGGGGSQTVVTQEPSLTVSPGGTVTLTCGSSTGAVTSGNYPNWVQQKPGQAPRGLIGGTKFLAPGTPARFSGSLLGGKAALTLSGVQPEDEAEYYCVLWYSNRWVFGGGTKLTVL

SEQ ID NO: 726 - DNA, 1512 bp, Artificial Sequence
  HD37-P LH x I2C HL
gatatccagctgacccagtctccagcttctttggctgtgtctctagggcagagggccaccatctcctgcaaggccagccaaagtgttgattatgatggtccaagttatttgaactggtaccaacagattccaggacagccacccaaactcctcatctatgatgcatccaatctagtttctgggatcccacccaggtttagtggcagtgggtctgggacagacttcaccctcaacatccatcctgtggagaaggtggatgctgcaacctatcactgtcagcaaagtactgaggatccgtggacgttcggtggagggaccaagctcgagatcaaaggtggtggtggttctggcggcggcggctccggtggtggtggttctcaggtgcagctgcagcagtctggggctgagctggtgaggcctgggtcctcagtgaagatttcctgcaaggcttctggctatgcattcagtagctactggatgaactgggtgaagcagaggcctggacagggtcttgagtggattggacagatttggcctggagatggtgatactaactacaatggaaagttcaagggtaaagccactctgactgcagacgaatcctccagcacagcctacatgcaactcagcagcctagcatctgaggactctgcggtctatttctgtgcaagacgggagactacgacggtaggccgttattactatgctatggactactggggccaagggaccacggtcaccgtctcctccggaggtggtggatccgaggtgcagctggtcgagtctggaggaggattggtgcagcctggagggtcattgaaactctcatgtgcagcctctggattcaccttcaataagtacgccatgaactgggtccgccaggctccaggaaagggtttggaatgggttgctcgcataagaagtaaatataataattatgcaacatattatgccgattcagtgaaagacaggttcaccatctccagagatgattcaaaaaacactgcctatctacaaatgaacaacttgaaaactgaggacactgccgtgtactactgtgtgagacatgggaacttcggtaatagctacatatcctactgggcttactggggccaagggactctggtcaccgtctcctcaggtggtggtggttctggcggcggcggctccggtggtggtggttctcagactgttgtgactcaggaaccttcactcaccgtatcacctggtggaacagtcacactcacttgtggctcctcgactggggctgttacatctggcaactacccaaactgggtccaacaaaaaccaggtcaggcaccccgtggtctaataggtgggactaagttcctcgcccccggtactcctgccagattctcaggctccctgcttggaggcaaggctgccctcaccctctcaggggtacagccagaggatgaggcagaatattactgtgttctatggtacagcaaccgctgggtgttcggtggaggaaccaaactgactgtccta

SEQ ID NO: 727 - protein, 111 aa, Artificial Sequence
  HD37-F L
DIQLTQSPASLAVSLGQRATISCKASQSVDYDGFSYLNWYQQIPGQPPKLLIYDASNLVSGIPPRFSGSGSGTDFTLNIHPVEKVDAATYHCQQSTEDPWTFGGGTKLEIK

SEQ ID NO: 728 - DNA, 333 bp, Artificial Sequence
  HD37-F L
gatatccagctgacccagtctccagcttctttggctgtgtctctagggcagagggccaccatctcctgcaaggccagccaaagtgttgattatgatggtttcagttatttgaactggtaccaacagattccaggacagccacccaaactcctcatctatgatgcatccaatctagtttctgggatcccacccaggtttagtggcagtgggtctgggacagacttcaccctcaacatccatcctgtggagaaggtggatgctgcaacctatcactgtcagcaaagtactgaggatccgtggacgttcggtggagggaccaagctcgagatcaaa

SEQ ID NO: 729 - protein, 15 aa, Artificial Sequence
  HD37-F LCDR1
KASQSVDYDGFSYLN

SEQ ID NO: 730 - protein, 7 aa, Artificial Sequence
  HD37-F LCDR2
DASNLVS

SEQ ID NO: 731 - protein, 9 aa, Artificial Sequence
  HD37-F LCDR3
QQSTEDPWT

SEQ ID NO: 732 - protein, 124 aa, Artificial Sequence; identical to SEQ ID NO: 476
  HD37-F H

SEQ ID NO: 733 - DNA, 372 bp, Artificial Sequence; identical to SEQ ID NO: 477
  HD37-F H

SEQ ID NO: 734 - protein, 5 aa, Artificial Sequence
  HD37-F HCDR1
SYWMN

SEQ ID NO: 735 - protein, 17 aa, Artificial Sequence
  HD37-F HCDR2
QIWPGDGDTNYNGKFKG

SEQ ID NO: 736 - protein, 15 aa, Artificial Sequence
  HD37-F HCDR3
RETTTVGRYYYAMDY

SEQ ID NO: 737 - protein, 504 aa, Artificial Sequence
  HD37-F LH x I2C HL
DIQLTQSPASLAVSLGQRATISCKASQSVDYDGFSYLNWYQQIPGQPPKLLIYDASNLVSGIPPRFSGSGSGTDFTLNIHPVEKVDAATYHCQQSTEDPWTFGGGTKLEIKGGGGSGGGGSGGGGSQVQLQQSGAELVRPGSSVKISCKASGYAFSSYWMNWVKQRPGQGLEWIGQIWPGDGDTNYNGKFKGKATLTADESSSTAYMQLSSLASEDSAVYFCARRETTTVGRYYYAMDYWGQGTTVTVSSGGGGSEVQLVESGGGLVQPGGSLKLSCAASGFTFNKYAMNWVRQAPGKGLEWVARIRSKYNNYATYYADSVKDRFTISRDDSKNTAYLQMNNLKTEDTAVYYCVRHGNFGNSYISYWAYWGQGTLVTVSSGGGGSGGGGSGGGGSQTVVTQEPSLTVSPGGTVTLTCGSSTGAVTSGNYPNWVQQKPGQAPRGLIGGTKFLAPGTPARFSGSLLGGKAALTLSGVQPEDEAEYYCVLWYSNRWVFGGGTKLTVL

SEQ ID NO: 738 - DNA, 1512 bp, Artificial Sequence
  HD37-F LH x I2C HL
gatatccagctgacccagtctccagcttctttggctgtgtctctagggcagagggccaccatctcctgcaaggccagccaaagtgttgattatgatggtttcagttatttgaactggtaccaacagattccaggacagccacccaaactcctcatctatgatgcatccaatctagtttctgggatcccacccaggtttagtggcagtgggtctgggacagacttcaccctcaacatccatcctgtggagaaggtggatgctgcaacctatcactgtcagcaaagtactgaggatccgtggacgttcggtggagggaccaagctcgagatcaaaggtggtggtggttctggcggcggcggctccggtggtggtggttctcaggtgcagctgcagcagtctggggctgagctggtgaggcctgggtcctcagtgaagatttcctgcaaggcttctggctatgcattcagtagctactggatgaactgggtgaagcagaggcctggacagggtcttgagtggattggacagatttggcctggagatggtgatactaactacaatggaaagttcaagggtaaagccactctgactgcagacgaatcctccagcacagcctacatgcaactcagcagcctagcatctgaggactctgcggtctatttctgtgcaagacgggagactacgacggtaggccgttattactatgctatggactactggggccaagggaccacggtcaccgtctcctccggaggtggtggatccgaggtgcagctggtcgagtctggaggaggattggtgcagcctggagggtcattgaaactctcatgtgcagcctctggattcaccttcaataagtacgccatgaactgggtccgccaggctccaggaaagggtttggaatgggttgctcgcataagaagtaaatataataattatgcaacatattatgccgattcagtgaaagacaggttcaccatctccagagatgattcaaaaaacactgcctatctacaaatgaacaacttgaaaactgaggacactgccgtgtactactgtgtgagacatgggaacttcggtaatagctacatatcctactgggcttactggggccaagggactctggtcaccgtctcctcaggtggtggtggttctggcggcggcggctccggtggtggtggttctcagactgttgtgactcaggaaccttcactcaccgtatcacctggtggaacagtcacactcacttgtggctcctcgactggggctgttacatctggcaactacccaaactgggtccaacaaaaaccaggtcaggcaccccgtggtctaataggtgggactaagttcctcgcccccggtactcctgccagattctcaggctccctgcttggaggcaaggctgccctcaccctctcaggggtacagccagaggatgaggcagaatattactgtgttctatggtacagcaaccgctgggtgttcggtggaggaaccaaactgactgtccta

SEQ ID NO: 739 - protein, 111 aa, Artificial Sequence
  HD37-W L
DIQLTQSPASLAVSLGQRATISCKASQSVDYDGWSYLNWYQQIPGQPPKLLIYDASNLVSGIPPRFSGSGSGTDFTLNIHPVEKVDAATYHCQQSTEDPWTFGGGTKLEIK

SEQ ID NO: 740 - DNA, 333 bp, Artificial Sequence
  HD37-W L
gatatccagctgacccagtctccagcttctttggctgtgtctctagggcagagggccaccatctcctgcaaggccagccaaagtgttgattatgatggttggagttatttgaactggtaccaacagattccaggacagccacccaaactcctcatctatgatgcatccaatctagtttctgggatcccacccaggtttagtggcagtgggtctgggacagacttcaccctcaacatccatcctgtggagaaggtggatgctgcaacctatcactgtcagcaaagtactgaggatccgtggacgttcggtggagggaccaagctcgagatcaaa

SEQ ID NO: 741 - protein, 15 aa, Artificial Sequence
  HD37-W LCDR1
KASQSVDYDGWSYLN

SEQ ID NO: 742 - protein, 7 aa, Artificial Sequence
  HD37-W LCDR2
DASNLVS

SEQ ID NO: 743 - protein, 9 aa, Artificial Sequence
  HD37-W LCDR3
QQSTEDPWT

SEQ ID NO: 744 - protein, 124 aa, Artificial Sequence; identical to SEQ ID NO: 476
  HD37-W H

SEQ ID NO: 745 - DNA, 372 bp, Artificial Sequence; identical to SEQ ID NO: 477
  HD37-W H

SEQ ID NO: 746 - protein, 5 aa, Artificial Sequence
  HD37-W HCDR1
SYWMN

SEQ ID NO: 747 - protein, 17 aa, Artificial Sequence
  HD37-W HCDR2
QIWPGDGDTNYNGKFKG

SEQ ID NO: 748 - protein, 15 aa, Artificial Sequence
  HD37-W HCDR3
RETTTVGRYYYAMDY

SEQ ID NO: 749 - protein, 504 aa, Artificial Sequence
  HD37-W LH x I2C HL
DIQLTQSPASLAVSLGQRATISCKASQSVDYDGWSYLNWYQQIPGQPPKLLIYDASNLVSGIPPRFSGSGSGTDFTLNIHPVEKVDAATYHCQQSTEDPWTFGGGTKLEIKGGGGSGGGGSGGGGSQVQLQQSGAELVRPGSSVKISCKASGYAFSSYWMNWVKQRPGQGLEWIGQIWPGDGDTNYNGKFKGKATLTADESSSTAYMQLSSLASEDSAVYFCARRETTTVGRYYYAMDYWGQGTTVTVSSGGGGSEVQLVESGGGLVQPGGSLKLSCAASGFTFNKYAMNWVRQAPGKGLEWVARIRSKYNNYATYYADSVKDRFTISRDDSKNTAYLQMNNLKTEDTAVYYCVRHGNFGNSYISYWAYWGQGTLVTVSSGGGGSGGGGSGGGGSQTVVTQEPSLTVSPGGTVTLTCGSSTGAVTSGNYPNWVQQKPGQAPRGLIGGTKFLAPGTPARFSGSLLGGKAALTLSGVQPEDEAEYYCVLWYSNRWVFGGGTKLTVL

SEQ ID NO: 750 - DNA, 1512 bp, Artificial Sequence
  HD37-W LH x I2C HL
gatatccagctgacccagtctccagcttctttggctgtgtctctagggcagagggccaccatctcctgcaaggccagccaaagtgttgattatgatggttggagttatttgaactggtaccaacagattccaggacagccacccaaactcctcatctatgatgcatccaatctagtttctgggatcccacccaggtttagtggcagtgggtctgggacagacttcaccctcaacatccatcctgtggagaaggtggatgctgcaacctatcactgtcagcaaagtactgaggatccgtggacgttcggtggagggaccaagctcgagatcaaaggtggtggtggttctggcggcggcggctccggtggtggtggttctcaggtgcagctgcagcagtctggggctgagctggtgaggcctgggtcctcagtgaagatttcctgcaaggcttctggctatgcattcagtagctactggatgaactgggtgaagcagaggcctggacagggtcttgagtggattggacagatttggcctggagatggtgatactaactacaatggaaagttcaagggtaaagccactctgactgcagacgaatcctccagcacagcctacatgcaactcagcagcctagcatctgaggactctgcggtctatttctgtgcaagacgggagactacgacggtaggccgttattactatgctatggactactggggccaagggaccacggtcaccgtctcctccggaggtggtggatccgaggtgcagctggtcgagtctggaggaggattggtgcagcctggagggtcattgaaactctcatgtgcagcctctggattcaccttcaataagtacgccatgaactgggtccgccaggctccaggaaagggtttggaatgggttgctcgcataagaagtaaatataataattatgcaacatattatgccgattcagtgaaagacaggttcaccatctccagagatgattcaaaaaacactgcctatctacaaatgaacaacttgaaaactgaggacactgccgtgtactactgtgtgagacatgggaacttcggtaatagctacatatcctactgggcttactggggccaagggactctggtcaccgtctcctcaggtggtggtggttctggcggcggcggctccggtggtggtggttctcagactgttgtgactcaggaaccttcactcaccgtatcacctggtggaacagtcacactcacttgtggctcctcgactggggctgttacatctggcaactacccaaactgggtccaacaaaaaccaggtcaggcaccccgtggtctaataggtgggactaagttcctcgcccccggtactcctgccagattctcaggctccctgcttggaggcaaggctgccctcaccctctcaggggtacagccagaggatgaggcagaatattactgtgttctatggtacagcaaccgctgggtgttcggtggaggaaccaaactgactgtccta

SEQ ID NO: 751 - protein, 111 aa, Artificial Sequence
  HD37-M L
DIQLTQSPASLAVSLGQRATISCKASQSVDYDGMSYLNWYQQIPGQPPKLLIYDASNLVSGIPPRFSGSGSGTDFTLNIHPVEKVDAATYHCQQSTEDPWTFGGGTKLEIK

SEQ ID NO: 752 - DNA, 333 bp, Artificial Sequence
  HD37-M L
gatatccagctgacccagtctccagcttctttggctgtgtctctagggcagagggccaccatctcctgcaaggccagccaaagtgttgattatgatggtatgagttatttgaactggtaccaacagattccaggacagccacccaaactcctcatctatgatgcatccaatctagtttctgggatcccacccaggtttagtggcagtgggtctgggacagacttcaccctcaacatccatcctgtggagaaggtggatgctgcaacctatcactgtcagcaaagtactgaggatccgtggacgttcggtggagggaccaagctcgagatcaaa

SEQ ID NO: 753 - protein, 15 aa, Artificial Sequence
  HD37-M LCDR1
KASQSVDYDGMSYLN

SEQ ID NO: 754 - protein, 7 aa, Artificial Sequence
  HD37-M LCDR2
DASNLVS

SEQ ID NO: 755 - protein, 9 aa, Artificial Sequence
  HD37-M LCDR3
QQSTEDPWT

SEQ ID NO: 756 - protein, 124 aa, Artificial Sequence; identical to SEQ ID NO: 476
  HD37-M H

SEQ ID NO: 757 - DNA, 372 bp, Artificial Sequence; identical to SEQ ID NO: 477
  HD37-M H

SEQ ID NO: 758 - protein, 5 aa, Artificial Sequence
  HD37-M HCDR1
SYWMN

SEQ ID NO: 759 - protein, 17 aa, Artificial Sequence
  HD37-M HCDR2
QIWPGDGDTNYNGKFKG

SEQ ID NO: 760 - protein, 15 aa, Artificial Sequence
  HD37-M HCDR3
RETTTVGRYYYAMDY

SEQ ID NO: 761 - protein, 504 aa, Artificial Sequence
  HD37-M LH x I2C HL
DIQLTQSPASLAVSLGQRATISCKASQSVDYDGMSYLNWYQQIPGQPPKLLIYDASNLVSGIPPRFSGSGSGTDFTLNIHPVEKVDAATYHCQQSTEDPWTFGGGTKLEIKGGGGSGGGGSGGGGSQVQLQQSGAELVRPGSSVKISCKASGYAFSSYWMNWVKQRPGQGLEWIGQIWPGDGDTNYNGKFKGKATLTADESSSTAYMQLSSLASEDSAVYFCARRETTTVGRYYYAMDYWGQGTTVTVSSGGGGSEVQLVESGGGLVQPGGSLKLSCAASGFTFNKYAMNWVRQAPGKGLEWVARIRSKYNNYATYYADSVKDRFTISRDDSKNTAYLQMNNLKTEDTAVYYCVRHGNFGNSYISYWAYWGQGTLVTVSSGGGGSGGGGSGGGGSQTVVTQEPSLTVSPGGTVTLTCGSSTGAVTSGNYPNWVQQKPGQAPRGLIGGTKFLAPGTPARFSGSLLGGKAALTLSGVQPEDEAEYYCVLWYSNRWVFGGGTKLTVL

SEQ ID NO: 762 - DNA, 1512 bp, Artificial Sequence
  HD37-M LH x I2C HL
gatatccagctgacccagtctccagcttctttggctgtgtctctagggcagagggccaccatctcctgcaaggccagccaaagtgttgattatgatggtatgagttatttgaactggtaccaacagattccaggacagccacccaaactcctcatctatgatgcatccaatctagtttctgggatcccacccaggtttagtggcagtgggtctgggacagacttcaccctcaacatccatcctgtggagaaggtggatgctgcaacctatcactgtcagcaaagtactgaggatccgtggacgttcggtggagggaccaagctcgagatcaaaggtggtggtggttctggcggcggcggctccggtggtggtggttctcaggtgcagctgcagcagtctggggctgagctggtgaggcctgggtcctcagtgaagatttcctgcaaggcttctggctatgcattcagtagctactggatgaactgggtgaagcagaggcctggacagggtcttgagtggattggacagatttggcctggagatggtgatactaactacaatggaaagttcaagggtaaagccactctgactgcagacgaatcctccagcacagcctacatgcaactcagcagcctagcatctgaggactctgcggtctatttctgtgcaagacgggagactacgacggtaggccgttattactatgctatggactactggggccaagggaccacggtcaccgtctcctccggaggtggtggatccgaggtgcagctggtcgagtctggaggaggattggtgcagcctggagggtcattgaaactctcatgtgcagcctctggattcaccttcaataagtacgccatgaactgggtccgccaggctccaggaaagggtttggaatgggttgctcgcataagaagtaaatataataattatgcaacatattatgccgattcagtgaaagacaggttcaccatctccagagatgattcaaaaaacactgcctatctacaaatgaacaacttgaaaactgaggacactgccgtgtactactgtgtgagacatgggaacttcggtaatagctacatatcctactgggcttactggggccaagggactctggtcaccgtctcctcaggtggtggtggttctggcggcggcggctccggtggtggtggttctcagactgttgtgactcaggaaccttcactcaccgtatcacctggtggaacagtcacactcacttgtggctcctcgactggggctgttacatctggcaactacccaaactgggtccaacaaaaaccaggtcaggcaccccgtggtctaataggtgggactaagttcctcgcccccggtactcctgccagattctcaggctccctgcttggaggcaaggctgccctcaccctctcaggggtacagccagaggatgaggcagaatattactgtgttctatggtacagcaaccgctgggtgttcggtggaggaaccaaactgactgtccta

SEQ ID NO: 763 - DNA, 72 bp, Artificial Sequence
  37VH-aXho1
cagctgctcgagtctggggctgagstgrwgargcctgggkcctcagtgaagrtttcctgcaaggcttctggc

SEQ ID NO: 764 - DNA, 81 bp, Artificial Sequence
  37VH-b
ccactcaagaccctgtccagggssctgcytcacccagttcatccagtagctagwgaatgyatagccagaagccttgcagga

SEQ ID NO: 765 - DNA, 72 bp, Artificial Sequence
  37VH-c
ggacagggtcttgagtggatkggacagatttggcctggagatggtgatactaactacaatggaaagttcaag

SEQ ID NO: 766 - DNA, 82 bp, Artificial Sequence
  37VH-d
caggctgctgagttscatgtagrctgtgctggtggatkygtcassagtcakagtgrctytacccttgaactttccattgtag

SEQ ID NO: 767 - DNA, 71 bp, Artificial Sequence
  37VH-e
catgsaactcagcagcctgssatctgaggacactgcggtctattwctgtgcaagacgggagactacgacgg

SEQ ID NO: 768 - DNA, 81 bp, Artificial Sequence
  37VH-fBstE2
ggagacggtgaccgtggtcccttggccccagtagtccatagcatagtaataacggcctaccgtcgtagtctcccgtcttgc

SEQ ID NO: 769 - DNA, 84 bp, Artificial Sequence
  37VL-A-SacI
cagctggagctccagatgacccagtctccakcttctttgkctgygtctstagggsasagagycaccatcwcctgcaaggccagc

SEQ ID NO: 770 - DNA, 69 bp, Artificial Sequence
  37VL-B
  misc_feature (26)..(27): n is a, c, g, or t
ctgttggtaccagttcaaataastsnnaccatcataatcaacactttggctggccttgcaggtgatggt

SEQ ID NO: 771 - DNA, 72 bp, Artificial Sequence
  37VL-C
ttgaactggtaccaacagawaccaggamagscacccaaactcctcatctatgatgcatccaatctagtttct

SEQ ID NO: 772 - DNA, 69 bp, Artificial Sequence
  37VL-D
gagggtgaagtctgtcccagacccactgccactaaacctggrtgggaycccagaaactagattggatgc

SEQ ID NO: 773 - DNA, 78 bp, Artificial Sequence
  37VL-E
gggacagacttcaccctcamcatcmrtyctstgsagmmggwggatkycgcaacctatyactgtcagcaaagtactgag

SEQ ID NO: 774 - DNA, 79 bp, Artificial Sequence
  37VL-F-BsiW1Spe1
actcagactagtcgtacgtttgatctccaccttggtcccttgaccgaacgtccacggatcctcagtactttgctgacag

SEQ ID NO: 775 - protein, 8 aa, Artificial Sequence
  Flag-tag
DYKDDDDK

SEQ ID NO: 776 - DNA, 4173 bp, Artificial Sequence
  human cMET construct
atgaaggcccccgctgtgcttgcacctggcatcctcgtgctcctgtttaccttggtgcagaggagcaatggggagtgtaaagaggcactagcaaagtccgagatgaatgtgaatatgaagtatcagcttcccaacttcaccgcggaaacacccatccagaatgtcattctacatgagcatcacattttccttggtgccactaactacatttatgttttaaatgaggaagaccttcagaaggttgctgagtacaagactgggcctgtgctggaacacccagattgtttcccatgtcaggactgcagcagcaaagccaatttatcaggaggtgtttggaaagataacatcaacatggctctagttgtggacacctactatgatgatcaactcattagctgtggcagcgtcaacagagggacctgccagcgacatgtctttccccacaatcatactgctgacatacagtcggaggttcactgcatattctccccacagatagaagagcccagccagtgtcctgactgtgtggtgagcgccctgggagccaaagtcctttcatctgtaaaggaccggttcatcaacttctttgtaggcaataccataaattcttcttatttcccagatcatccattgcattcgatatcagtgagaaggctaaaggaaacgaaagatggttttatgtttttgacggaccagtcctacattgatgttttacctgagttcagagattcttaccccattaagtatgtccatgcctttgaaagcaacaattttatttacttcttgacggtccaaagggaaactctagatgctcagacttttcacacaagaataatcaggttctgttccataaactctggattgcattcctacatggaaatgcctctggagtgtattctcacagaaaagagaaaaaagagatccacaaagaaggaagtgtttaatatacttcaggctgcgtatgtcagcaagcctggggcccagcttgctagacaaataggagccagcctgaatgatgacattcttttcggggtgttcgcacaaagcaagccagattctgccgaaccaatggatcgatctgccatgtgtgcattccctatcaaatatgtcaacgacttcttcaacaagatcgtcaacaaaaacaatgtgagatgtctccagcatttttacggacccaatcatgagcactgctttaataggacacttctgagaaattcatcaggctgtgaagcgcgccgtgatgaatatcgaacagagtttaccacagctttgcagcgcgttgacttattcatgggtcaattcagcgaagtcctcttaacatctatatccaccttcattaaaggagacctcaccatagctaatcttgggacatcagagggtcgcttcatgcaggttgtggtttctcgatcaggaccatcaacccctcatgtgaattttctcctggactcccatccagtgtctccagaagtgattgtggagcatacattaaaccaaaatggctacacactggttatcactgggaagaagatcacgaagatcccattgaatggcttgggctgcagacatttccagtcctgcagtcaatgcctctctgccccaccctttgttcagtgtggctggtgccacgacaaatgtgtgcgatcggaggaatgcctgagcgggacatggactcaacagatctgtctgcctgcaatctacaaggttttcccaaatagtgcaccccttgaaggagggacaaggctgaccatatgtggctgggactttggatttcggaggaataataaatttgatttaaagaaaactagagttctccttggaaatgagagctgcaccttgactttaagtgagagcacgatgaatacattgaaatgcacagttggtcctgccatgaataagcatttcaatatgtccataattatttcaaatggccacgggacaacacaatacagtacattctcctatgtggatcctgtaataacaagtatttcgccgaaatacggtcctatggctggtggcactttacttactttaactggaaattacctaaacagtgggaatagcagacacatttcaattggtggaaaaacatgtactttaaaaagtgtgtcaaacagtattcttgaatgttataccccagcccaaaccatttcaactgagtttgctgttaaattgaaaattgacttagccaaccgagagacaagcatcttcagttaccgtgaagatcccattgtctatgaaattcatccaaccaaatcttttattagtggtgggagcacaataacaggtgttgggaaaaacctgaactcagttagtgtcccgagaatggtcataaatgtgcatgaagcaggaaggaactttacagtggcatgtcaacatcgctctaattcagagataatctgttgtaccactccttccctgcaacagctgaatctgcaactccccctgaaaaccaaagcctttttcatgttagatgggatcctttccaaatactttgatctcatttatgtacataatcctgtgtttaagccttttgaaaagccagtgatgatctcaatgggcaatgaaaatgtactggaaattaagggaaatgatattgaccctgaagcagttaaaggtgaagtgttaaaagttggaaataagagctgtgagaatatacacttacattctgaagccgttttatgcacggtccccaatgacctgctgaaattgaacagcgagctaaatatagagtggaagcaagcaatttcttcaaccgtccttggaaaagtaatagttcaaccagatcagaatttcacaggattgattgctggtgttgtctcaatatcaacagcactgttattactacttgggtttttcctgtggctgaaaaagagaaagcaaattaaagatctgggcagtgaattagttcgctacgatgcaagagtacacactcctcatttggataggcttgtaagtgcccgaagtgtaagcccaactacagaaatggtttcaaatgaatctgtagactaccgagctacttttccagaagatcagtttcctaattcatctcagaacggttcatgccgacaagtgcagtatcctctgacagacatgtcccccatcctaactagtggggactctgatatatccagtccattactgcaaaatactgtccacattgacctcagtgctctaaatccagagctggtccaggcagtgcagcatgtagtgattgggcccagtagcctgattgtgcatttcaatgaagtcataggaagagggcattttggttgtgtatatcatgggactttgttggacaatgatggcaagaaaattcactgtgctgtgaaatccttgaacagaatcactgacataggagaagtttcccaatttctgaccgagggaatcatcatgaaagattttagtcatcccaatgtcctctcgctcctgggaatctgcctgcgaagtgaagggtctccgctggtggtcctaccatacatgaaacatggagatcttcgaaatttcattcgaaatgagactcataatccaactgtaaaagatcttattggctttggtcttcaagtagccaaaggcatgaaatatcttgcaagcaaaaagtttgtccacagagacttggctgcaagaaactgtatgctggatgaaaaattcacagtcaaggttgctgattttggtcttgccagagacatgtatgataaagaatactatagtgtacacaacaaaacaggtgcaaagctgccagtgaagtggatggctttggaaagtctgcaaactcaaaagtttaccaccaagtcagatgtgtggtcctttggcgtgctcctctgggagctgatgacaagaggagccccaccttatcctgacgtaaacacctttgatataactgtttacttgttgcaagggagaagactcctacaacccgaatactgcccagaccccttatatgaagtaatgctaaaatgctggcaccctaaagccgaaatgcgcccatccttttctgaactggtgtcccggatatcagcgatcttctctactttcattggggagcactatgtccatgtgaacgctacttatgtgaacgtaaaatgtgtcgctccgtatccttctctgttgtcatcagaagataacgctgatgatgaggtggacacacgaccagcctccttctgggagacatcatag

SEQ ID NO: 777 - protein, 1390 aa, Artificial Sequence
  human cMET construct
MKAPAVLAPGILVLLFTLVQRSNGECKEALAKSEMNVNMKYQLPNFTAETPIQNVILHEHHIFLGATNYIYVLNEEDLQKVAEYKTGPVLEHPDCFPCQDCSSKANLSGGVWKDNINMALVVDTYYDDQLISCGSVNRGTCQRHVFPHNHTADIQSEVHCIFSPQIEEPSQCPDCVVSALGAKVLSSVKDRFINFFVGNTINSSYFPDHPLHSISVRRLKETKDGFMFLTDQSYIDVLPEFRDSYPIKYVHAFESNNFIYFLTVQRETLDAQTFHTRIIRFCSINSGLHSYMEMPLECILTEKRKKRSTKKEVFNILQAAYVSKPGAQLARQIGASLNDDILFGVFAQSKPDSAEPMDRSAMCAFPIKYVNDFFNKIVNKNNVRCLQHFYGPNHEHCFNRTLLRNSSGCEARRDEYRTEFTTALQRVDLFMGQFSEVLLTSISTFIKGDLTIANLGTSEGRFMQVVVSRSGPSTPHVNFLLDSHPVSPEVIVEHTLNQNGYTLVITGKKITKIPLNGLGCRHFQSCSQCLSAPPFVQCGWCHDKCVRSEECLSGTWTQQICLPAIYKVFPNSAPLEGGTRLTICGWDFGFRRNNKFDLKKTRVLLGNESCTLTLSESTMNTLKCTVGPAMNKHFNMSIIISNGHGTTQYSTFSYVDPVITSISPKYGPMAGGTLLTLTGNYLNSGNSRHISIGGKTCTLKSVSNSILECYTPAQTISTEFAVKLKIDLANRETSIFSYREDPIVYEIHPTKSFISGGSTITGVGKNLNSVSVPRMVINVHEAGRNFTVACQHRSNSEIICCTTPSLQQLNLQLPLKTKAFFMLDGILSKYFDLIYVHNPVFKPFEKPVMISMGNENVLEIKGNDIDPEAVKGEVLKVGNKSCENIHLHSEAVLCTVPNDLLKLNSELNIEWKQAISSTVLGKVIVQPDQNFTGLIAGVVSISTALLLLLGFFLWLKKRKQIKDLGSELVRYDARVHTPHLDRLVSARSVSPTTEMVSNESVDYRATFPEDQFPNSSQNGSCRQVQYPLTDMSPILTSGDSDISSPLLQNTVHIDLSALNPELVQAVQHVVIGPSSLIVHFNEVIGRGHFGCVYHGTLLDNDGKKIHCAVKSLNRITDIGEVSQFLTEGIIMKDFSHPNVLSLLGICLRSEGSPLVVLPYMKHGDLRNFIRNETHNPTVKDLIGFGLQVAKGMKYLASKKFVHRDLAARNCMLDEKFTVKVADFGLARDMYDKEYYSVHNKTGAKLPVKWMALESLQTQKFTTKSDVWSFGVLLWELMTRGAPPYPDVNTFDITVYLLQGRRLLQPEYCPDPLYEVMLKCWHPKAEMRPSFSELVSRISAIFSTFIGEHYVHVNATYVNVKCVAPYPSLLSSEDNADDEVDTRPASFWETS

SEQ ID NO: 778 - DNA, 37 bp, Artificial Sequence
  forward primer
aggaattcaccatgaaggcccccgctgtgcttgcacc

SEQ ID NO: 779 - DNA, 23 bp, Artificial Sequence
  reverse primer
ctccagaggcatttccatgtagg

SEQ ID NO: 780 - DNA, 23 bp, Artificial Sequence
  forward primer
gtccaaagggaaactctagatgc

SEQ ID NO: 781 - DNA, 24 bp, Artificial Sequence
  reverse primer
ggagacactggatgggagtccagg

SEQ ID NO: 782 - DNA, 24 bp, Artificial Sequence
  forward primer
catcagagggtcgcttcatgcagg

SEQ ID NO: 783 - DNA, 24 bp, Artificial Sequence
  reverse primer
gctttggttttcagggggagttgc

SEQ ID NO: 784 - DNA, 28 bp, Artificial Sequence
  forward primer
atccaaccaaatcttttattagtggtgg

SEQ ID NO: 785 - DNA, 25 bp, Artificial Sequence
  reverse primer
gacttcattgaaatgcacaatcagg

SEQ ID NO: 786 - DNA, 23 bp, Artificial Sequence
  forward primer
tgctctaaatccagagctggtcc

SEQ ID NO: 787 - DNA, 26 bp, Artificial Sequence
  reverse primer
gtcagataagaaattccttagaatcc

SEQ ID NO: 788 - DNA, 4146 bp, Artificial Sequence
  macaque cMET construct
atgaaggcccccgctgtgcttgcacctggcatcctcgtgctcctgtttaccttggtgcagaggagcaatggggagtgtaaagaggcactagcaaagtccgagatgaatgtgaatatgaagtatcagcttcccaacttcaccgcggaaacagccatccagaatgtcattctacatgagcatcacattttcctcggtgccaccaactacatttatgttttaaatgaggaagaccttcagaaggttgctgagtacaagaccgggcctgtgctggaacacccagattgtttcccgtgtcaggactgcagcagcaaagccaatttatcaggaggcgtttggaaagataacatcaacatggctctggttgtggacacctactatgatgatcaactcattagctgtggcagcgtcaacagagggacctgccagcgacatgtctttccccataatcatactgctgacatacagtcggaggttcactgcatattctccccacagatagaagagcccaaccagtgccctgactgtgtggtgagcgccctgggagccaaagtcctttcatctgtaaaggaccggttcatcaacttctttgtaggcaataccataaattcttcttatttcccacatcatccgttgcattcgatatcagtgagaaggctaaaggaaacgaaagatggttttatgtttttgacagaccagtcctacattgatgttttacctgagttcagagattcttaccccattaagtacatccacgcttttgaaagcaacaattttatttacttcttgacggtccaaagggaaactctaaatgctcagacttttcacacaagaataatcaggttctgttccttaaactctggattgcactcctacatggaaatgcctctagagtgtattctcacagaaaagagaaaaaagagatccacaaagaaggaagtgtttaatatccttcaggctgcatatgtcagcaagcccggggcccagcttgctagacaaataggagccagcctgaatgatgacattctctttggggtgttcgcacaaagcaagccagattctgccgaaccaatggatcgatctgcaatgtgtgcatttcctatcaaatatgtcaacgacttcttcaacaagatcgtcaacaaaaacaatgtgagatgtctccagcatttttatggacccaatcatgagcactgttttaataggacacttctgagaaattcatcaggctgtgaagcgcgccgtgatgaatatcgagcagagtttaccacagctttgcagcgggttgacttattcatgggtcaattcagcgaagtcctcttaacatctatatccaccttcgtgaaaggagacctcaccatcgctaatcttgggacatcagagggtcgcttcatgcaggttgtggtttctcgatcaggaccatcaacccctcatgtgaattttctcctggactctcacccggtgtctccagaagtgattgtggagcatccattaaaccagaatggctacacactggttgtcacggggaagaagatcaccaagatcccattgaatggcttgggctgcagacatttccagtcctgcagtcagtgcctctctgccccaccctttgtgcagtgtggctggtgccacgacaaatgtgtgcgatcggaggaatgccccagtgggacatggactcaacagatctgtctgcctgcaatctacaaggttttcccaactagtgcaccccttgaaggagggacaaggctgaccatatgtggctgggactttggatttcggaggaataataaatttgatttaaagaaaactagagttctccttggaaatgagagctgcaccttgactttaagtgagagcacgatgaatacattgaaatgcacagttggtcctgccatgaataaacatttcaatatgtccataattatttcaaatggccacgggacaacacaatacagtacattttcctatgtggatcctataataacaagtatttcgccaaaatatggccctatggctggtggcactttacttactttaactggaaattacctaaacagtggcaattctagacacatttcaattggtggaaaaacatgtactttaaaaagtgtgtcaaacagtattctcgaatgttataccccagcccaaaccatttcaactgagtttgctgttaaattgaaaattgacttagccaaccgagagacaagcatcttcagttaccgggaagaccccattgtctatgaaattcatccaaccaaatcttttattagtggtgggagcacaataacaggtgttgggaaaaacctgcattcagttagtgtcccgaggatggtcataaatgtgcatgaagcaggaaggaactttacagtggcatgtcagcatcgctctaattcagagataatctgctgtaccactccttccctgcaacagctgaatctgcaactccccctgaaaaccaaagcctttttcatgttagatgggatcctttccaaatactttgatctcatttatgtacataatcctgtgtttaagccttttgaaaagccagtaatgatctcaatgggcaatgaaaatgtactggaaattaagggaaatgatattgaccctgaagcagttaaaggtgaagtgttaaaagttggaaataagagctgtgagaatatacacttacattctgaagccgttttatgcacggtccccaatgacctgctgaaattgaacagcgagctaaatatagagtggaagcaagcaatttcttcaaccgtccttggaaaagtaatagttcaaccagatcagaatttcaccggattgattgctggtgttgtctcaatatcaatagcactcttactactacttgggcttttcctgtggctgaaaaagagaaagcaaattaaagatctgggcagtgaattagttcgctatgatgcaagagtacacactcctcatttggataggcttgtaagtgcccgaagtgtaagcccaacaacagaaatggtttcaaatgaatctgtagactaccgagctacttttccagaagatcagtttcctaattcatctcagaacggttcatgccgacaagtgcagtatcctctgacagacatgtcccccatcctgactagtggggactctgatatatccagtccattactgcaaaacactgtccacattgacctcagcgctctaaatccagagctggtccaggcagtgcagcatgtagtgattgggcccagtagcctgattgtgcatttcaatgaagtcataggaagagggcattttggttgtgtatatcatgggactttgttggacaatgatggcaagaaaattcactgtgctgtgaaatccttgaacagaatcactgacataggagaagtttcccagtttctgaccgagggaatcatcatgaaagattttagtcatcccaatgtcctctcgctcctgggaatctgcctgcgaagtgaagggtctccgctggtggtcctaccctacatgaaacatggagatcttcgaaatttcattcgaaatgagactcataatccaactgtaaaagatcttattggctttggtcttcaagtagccaaaggcatgaaatatcttgcaagcaaaaagtttgtccacagagacttggctgcaagaaactgtatgctggatgaaaaattcacagtcaaggttgctgattttggtcttgccagagacatgtatgataaagaatactatagtgtgcacaacaaaacaggtgcaaagctgccagtgaagtggatggctttggaaagtctgcaaactcaaaagtttaccaccaagtcagatgtgtggtcctttggtgtgctcctctgggagctcatgacaagaggagccccaccctatcctgatgtgaacacctttgatataactgtttacttgttgcaagggagaaggctcctacaacccgaatactgcccagaccccttatatgaagtaatgctaaaatgctggcaccctaaagcagaaatgcgcccatccttttctgaactggtgtcccggatatcagcgatcttctctactttcattggggagcactacgtccatgtaaacgctacttatgtgaacgtaaaatgtgtcgctccatatccttctctgttgtcatcagaagataacgctgatgacgaggtggacacatga

SEQ ID NO: 789 - protein, 1381 aa, Artificial Sequence
  macaque cMET construct
MKAPAVLAPGILVLLFTLVQRSNGECKEALAKSEMNVNMKYQLPNFTAETAIQNVILHEHHIFLGATNYIYVLNEEDLQKVAEYKTGPVLEHPDCFPCQDCSSKANLSGGVWKDNINMALVVDTYYDDQLISCGSVNRGTCQRHVFPHNHTADIQSEVHCIFSPQIEEPNQCPDCVVSALGAKVLSSVKDRFINFFVGNTINSSYFPHHPLHSISVRRLKETKDGFMFLTDQSYIDVLPEFRDSYPIKYIHAFESNNFIYFLTVQRETLNAQTFHTRIIRFCSLNSGLHSYMEMPLECILTEKRKKRSTKKEVFNILQAAYVSKPGAQLARQIGASLNDDILFGVFAQSKPDSAEPMDRSAMCAFPIKYVNDFFNKIVNKNNVRCLQHFYGPNHEHCFNRTLLRNSSGCEARRDEYRAEFTTALQRVDLFMGQFSEVLLTSISTFVKGDLTIANLGTSEGRFMQVVVSRSGPSTPHVNFLLDSHPVSPEVIVEHPLNQNGYTLVVTGKKITKIPLNGLGCRHFQSCSQCLSAPPFVQCGWCHDKCVRSEECPSGTWTQQICLPAIYKVFPTSAPLEGGTRLTICGWDFGFRRNNKFDLKKTRVLLGNESCTLTLSESTMNTLKCTVGPAMNKHFNMSIIISNGHGTTQYSTFSYVDPIITSISPKYGPMAGGTLLTLTGNYLNSGNSRHISIGGKTCTLKSVSNSILECYTPAQTISTEFAVKLKIDLANRETSIFSYREDPIVYEIHPTKSFISGGSTITGVGKNLHSVSVPRMVINVHEAGRNFTVACQHRSNSEIICCTTPSLQQLNLQLPLKTKAFFMLDGILSKYFDLIYVHNPVFKPFEKPVMISMGNENVLEIKGNDIDPEAVKGEVLKVGNKSCENIHLHSEAVLCTVPNDLLKLNSELNIEWKQAISSTVLGKVIVQPDQNFTGLIAGVVSISIALLLLLGLFLWLKKRKQIKDLGSELVRYDARVHTPHLDRLVSARSVSPTTEMVSNESVDYRATFPEDQFPNSSQNGSCRQVQYPLTDMSPILTSGDSDISSPLLQNTVHIDLSALNPELVQAVQHVVIGPSSLIVHFNEVIGRGHFGCVYHGTLLDNDGKKIHCAVKSLNRITDIGEVSQFLTEGIIMKDFSHPNVLSLLGICLRSEGSPLVVLPYMKHGDLRNFIRNETHNPTVKDLIGFGLQVAKGMKYLASKKFVHRDLAARNCMLDEKFTVKVADFGLARDMYDKEYYSVHNKTGAKLPVKWMALESLQTQKFTTKSDVWSFGVLLWELMTRGAPPYPDVNTFDITVYLLQGRRLLQPEYCPDPLYEVMLKCWHPKAEMRPSFSELVSRISAIFSTFIGEHYVHVNATYVNVKCVAPYPSLLSSEDNADDEVDT

SEQ ID NO: 790 - DNA, 81 bp, Artificial Sequence
  CM1-VH-A-XhoI
ccatgtctcgagtctgggsctgaastgrwgargcctggggcttcagtgaaartgtcctgcarggcttcgggctataccttc

SEQ ID NO: 791 - DNA, 74 bp, Artificial Sequence
  CM1-VH-B
atccactcaagccyttgtccaggcsyctgtytaacccagtgcaaccagtagctggtgaaggtatagcccgaagc

SEQ ID NO: 792 - DNA, 68 bp, Artificial Sequence
  CM1-VH-C
ggcttgagtggatkggcatgattgatccttccaatagtgacactaggtttaatccgaacttcaaggac

SEQ ID NO: 793 - DNA, 75 bp, Artificial Sequence
  CM1-VH-D
gctgctgagcwscatgtaggctgtgytggmagatstgtctmyaktsawtgtgrccytgtccttgaagttcggatt

SEQ ID NO: 794 - DNA, 75 bp, Artificial Sequence
  CM1-VH-E
gcctacatgswactcagcagcctgasatctgmggacactgcagtctattactgtgccasatatggtagctacgtt

SEQ ID NO: 795 - DNA, 60 bp, Artificial Sequence
  CM1-VH-F-BstEII
catgtaggtgaccgaggttccttgaccccagtagtccagaggggaaacgtagctaccata

SEQ ID NO: 796 - DNA, 69 bp, Artificial Sequence
  CM3-VH-A-XhoI
ccatgtctcgagtctgggrctgaastgrwgaagcctggggcttcagtgaagstgtcctgcaaggcttct

SEQ ID NO: 797 - DNA, 78 bp, Artificial Sequence
  CM3-VH-B
ctcaaggccttgtccaggcsyctgcytcacccagtgtatccagtaactggtgaaggtgtagccagaagccttgcagga

SEQ ID NO: 798 - DNA, 72 bp, Artificial Sequence
  CM3-VH-C
cctggacaaggccttgagtggatkggagagattaatcctagcagcggtcgtactaactacaacgagaaattc

SEQ ID NO: 799 - DNA, 61 bp, Artificial Sequence
  CM3-VH-D
ctgtggaggtagatktgtctmyagtcaytgtgaccytgttcttgaatttctcgttgtagtt

SEQ ID NO: 800 - DNA, 70 bp, Artificial Sequence
  CM3-VH-E
atctacctccacagyctacatgsaactcagcarcctgasatctgaggacactgcggtctattactgtgca

SEQ ID NO: 801 - DNA, 60 bp, Artificial Sequence
  CM3-VH-F-BstEII
catgtaggtgaccgtggtgccttggccccagtagcccctwcttgcacagtaatagaccgc

SEQ ID NO: 802 - DNA, 84 bp, Artificial Sequence
  CM1-VL-A-SacI
cctgtagagctcgtgatgacccagactccayyctccctamctgtgacasytggagagmmggyttctrtcagctgcaagtccagt

SEQ ID NO: 803 - DNA, 65 bp, Artificial Sequence
  CM1-VL-B
gtaccaggccaagtagttcttctgactgctagtatataaaagggactgactggacttgcagctga

SEQ ID NO: 804 - DNA, 69 bp, Artificial Sequence
  CM1-VL-C
tacttggcctggtaccwgcagaaaccaggtcagtctcctmaactgctgatttactgggcatccactagg

SEQ ID NO: 805 - DNA, 75 bp, Artificial Sequence
  CM1-VL-D
gagagtgaaatctgtcccagatccactgcctgagaagcgatcagggaccccagattccctagtggatgcccagta

SEQ ID NO: 806 - DNA, 69 bp, Artificial Sequence
  CM1-VL-E
acagatttcactctcamaatctccagwgtgraggctgasgacstggsagtttattactgtcagcaatat

SEQ ID NO: 807 - DNA, 84 bp, Artificial Sequence
  CM1-VL-F-BsiWI/SpeI
cctcagactagtcgtacgtttgatctccaactttgtgcctccaccgaacgtccacggataggcataatattgctgacagtaata

SEQ ID NO: 808 - DNA, 75 bp, Artificial Sequence
  CM3-VL-A-SacI
cctgtagagctcgtgatgacccaatctccasyttctttgsctgtgactctagggcagcsggcctccatctcctgc

SEQ ID NO: 809 - DNA, 66 bp, Artificial Sequence
  CM3-VL-Ba
gaaccaactcatataactaccaccatcataatcaacactttggctggccttgcaggagatggaggc

SEQ ID NO: 810 - DNA, 69 bp, Artificial Sequence
  CM3-VL-Bb
gaaccaactcatataactaccaccatcataatcaacactagattggctggccttgcaggagatggaggc

SEQ ID NO: 811 - DNA, 72 bp, Artificial Sequence
  CM3-VL-C
agttatatgagttggttccaacagagaccaggacagycacccarackcctcatctmtgctgcatccaatcta

SEQ ID NO: 812 - DNA, 69 bp, Artificial Sequence
  CM3-VL-D
ggtgaagtctgtcccagagccactgccactaaacctgkctgggaycccagattctagattggatgcagc

SEQ ID NO: 813 - DNA, 75 bp, Artificial Sequence
  CM3-VL-E
tctgggacagacttcaccctcaakatcymtcstgtggaggmggaggatgttgsaryctattactgtcagcaaagt

SEQ ID NO: 814 - DNA, 84 bp, Artificial Sequence
  CM3-VL-F-BsiWI/SpeI
cctcagactagtcgtacgtttgatctccagcttggtcccctgaccgaacgtgagcggatcctcataactttgctgacagtaata

SEQ ID NO: 815 - protein, 113 aa, Artificial Sequence
  MET-1 L
DIMMSQSPSSLTVSVGEKVTVSCKSSQSLLYTSSQKNYLAWYQQKPGQSPKLLIYWASTRESGVPDRFTGSGSGTDFTLTITSVKADDLAVYYCQQYYAYPWTFGGGTKLEIK

SEQ ID NO: 816 - protein, 17 aa, Artificial Sequence
  MET-1 L-CDR1
KSSQSLLYTSSQKNYLA

SEQ ID NO: 817 - protein, 7 aa, Artificial Sequence
  MET-1 L-CDR2
WASTRES

SEQ ID NO: 818 - protein, 9 aa, Artificial Sequence
  MET-1 L-CDR3
QQYYAYPWT

SEQ ID NO: 819 - DNA, 339 bp, Artificial Sequence
  MET-1 L
gatattatgatgagtcagtcccccagcagcctgaccgtgtccgtgggcgagaaggtgaccgtgtcttgcaagagcagccagagcctgctgtacaccagcagccagaagaactatctggcttggtatcagcagaagcccggccagagcccaaagctgctgatctactgggccagcacccgggagagcggagtgcccgacagattcaccggcagcggctccggcacagacttcaccctgaccatcaccagcgtgaaggccgacgacctggccgtgtactactgccagcagtactacgcctacccctggaccttcggcggagggaccaagctggagatcaag

SEQ ID NO: 820 - protein, 119 aa, Artificial Sequence
  MET-1 H
QVQLQQSGPELVRPGASVKMSCRASGYTFTSYWLHWVKQRPGQGLEWIGMIDPSNSDTRFNPNFKDKATLNVDRSSNTAYMLLSSLTSADSAVYYCATYGSYVSPLDYWGQGTSVTVSS

SEQ ID NO: 821 - protein, 5 aa, Artificial Sequence
  MET-1 H-CDR1
SYWLH

SEQ ID NO: 822 - protein, 17 aa, Artificial Sequence
  MET-1 H-CDR2
MIDPSNSDTRFNPNFKD

SEQ ID NO: 823 - protein, 10 aa, Artificial Sequence
  MET-1 H-CDR3
YGSYVSPLDY

SEQ ID NO: 824 - DNA, 357 bp, Artificial Sequence
  MET-1 H
caggtgcagctgcagcagagcggacccgagctggtgcggccaggcgcctccgtgaagatgagctgcagggccagcggctacaccttcaccagctactggctgcactgggtgaaacagagacctggacagggactggagtggatcggcatgatcgaccccagcaacagcgacaccaggttcaaccccaacttcaaggacaaggccaccctgaacgtggacaggtccagcaacaccgcctacatgctgctgtccagcctgacctctgccgacagcgccgtgtattactgtgccacctacggcagctacgtgtcccccctggactactggggccagggcacctctgtgacagtgtcctcc

SEQ ID NO: 825 - protein, 247 aa, Artificial Sequence
  MET-1 HL
QVQLQQSGPELVRPGASVKMSCRASGYTFTSYWLHWVKQRPGQGLEWIGMIDPSNSDTRFNPNFKDKATLNVDRSSNTAYMLLSSLTSADSAVYYCATYGSYVSPLDYWGQGTSVTVSSGGGGSGGGGSGGGGSDIMMSQSPSSLTVSVGEKVTVSCKSSQSLLYTSSQKNYLAWYQQKPGQSPKLLIYWASTRESGVPDRFTGSGSGTDFTLTITSVKADDLAVYYCQQYYAYPWTFGGGTKLEIK

SEQ ID NO: 826 - DNA, 741 bp, Artificial Sequence
  MET-1 HL
caggtgcagctgcagcagagcggacccgagctggtgcggccaggcgcctccgtgaagatgagctgcagggccagcggctacaccttcaccagctactggctgcactgggtgaaacagagacctggacagggactggagtggatcggcatgatcgaccccagcaacagcgacaccaggttcaaccccaacttcaaggacaaggccaccctgaacgtggacaggtccagcaacaccgcctacatgctgctgtccagcctgacctctgccgacagcgccgtgtattactgtgccacctacggcagctacgtgtcccccctggactactggggccagggcacctctgtgacagtgtcctccggtggtggtggttctggcggcggcggctccggtggtggtggttctgatattatgatgagtcagtcccccagcagcctgaccgtgtccgtgggcgagaaggtgaccgtgtcttgcaagagcagccagagcctgctgtacaccagcagccagaagaactatctggcttggtatcagcagaagcccggccagagcccaaagctgctgatctactgggccagcacccgggagagcggagtgcccgacagattcaccggcagcggctccggcacagacttcaccctgaccatcaccagcgtgaaggccgacgacctggccgtgtactactgccagcagtactacgcctacccctggaccttcggcggagggaccaagctggagatcaag

SEQ ID NO: 827 - protein, 247 aa, Artificial Sequence
  MET-1 LH
DIMMSQSPSSLTVSVGEKVTVSCKSSQSLLYTSSQKNYLAWYQQKPGQSPKLLIYWASTRESGVPDRFTGSGSGTDFTLTITSVKADDLAVYYCQQYYAYPWTFGGGTKLEIKGGGGSGGGGSGGGGSQVQLQQSGPELVRPGASVKMSCRASGYTFTSYWLHWVKQRPGQGLEWIGMIDPSNSDTRFNPNFKDKATLNVDRSSNTAYMLLSSLTSADSAVYYCATYGSYVSPLDYWGQGTSVTVSS

SEQ ID NO: 828 - DNA, 741 bp, Artificial Sequence
  MET-1 LH
gatattatgatgagtcagtcccccagcagcctgaccgtgtccgtgggcgagaaggtgaccgtgtcttgcaagagcagccagagcctgctgtacaccagcagccagaagaactatctggcttggtatcagcagaagcccggccagagcccaaagctgctgatctactgggccagcacccgggagagcggagtgcccgacagattcaccggcagcggctccggcacagacttcaccctgaccatcaccagcgtgaaggccgacgacctggccgtgtactactgccagcagtactacgcctacccctggaccttcggcggagggaccaagctggagatcaagggtggtggtggttctggcggcggcggctccggtggtggtggttctcaggtgcagctgcagcagagcggacccgagctggtgcggccaggcgcctccgtgaagatgagctgcagggccagcggctacaccttcaccagctactggctgcactgggtgaaacagagacctggacagggactggagtggatcggcatgatcgaccccagcaacagcgacaccaggttcaaccccaacttcaaggacaaggccaccctgaacgtggacaggtccagcaacaccgcctacatgctgctgtccagcctgacctctgccgacagcgccgtgtattactgtgccacctacggcagctacgtgtcccccctggactactggggccagggcacctctgtgacagtgtcctcc

SEQ ID NO: 829 - protein, 502 aa, Artificial Sequence
  MET-1 HL x I2C HL
QVQLQQSGPELVRPGASVKMSCRASGYTFTSYWLHWVKQRPGQGLEWIGMIDPSNSDTRFNPNFKDKATLNVDRSSNTAYMLLSSLTSADSAVYYCATYGSYVSPLDYWGQGTSVTVSSGGGGSGGGGSGGGGSDIMMSQSPSSLTVSVGEKVTVSCKSSQSLLYTSSQKNYLAWYQQKPGQSPKLLIYWASTRESGVPDRFTGSGSGTDFTLTITSVKADDLAVYYCQQYYAYPWTFGGGTKLEIKSGGGGSEVQLVESGGGLVQPGGSLKLSCAASGFTFNKYAMNWVRQAPGKGLEWVARIRSKYNNYATYYADSVKDRFTISRDDSKNTAYLQMNNLKTEDTAVYYCVRHGNFGNSYISYWAYWGQGTLVTVSSGGGGSGGGGSGGGGSQTVVTQEPSLTVSPGGTVTLTCGSSTGAVTSGNYPNWVQQKPGQAPRGLIGGTKFLAPGTPARFSGSLLGGKAALTLSGVQPEDEAEYYCVLWYSNRWVFGGGTKLTVL

SEQ ID NO: 830 - DNA, 1506 bp, Artificial Sequence
  MET-1 HL x I2C HL
caggtgcagctgcagcagagcggacccgagctggtgcggccaggcgcctccgtgaagatgagctgcagggccagcggctacaccttcaccagctactggctgcactgggtgaaacagagacctggacagggactggagtggatcggcatgatcgaccccagcaacagcgacaccaggttcaaccccaacttcaaggacaaggccaccctgaacgtggacaggtccagcaacaccgcctacatgctgctgtccagcctgacctctgccgacagcgccgtgtattactgtgccacctacggcagctacgtgtcccccctggactactggggccagggcacctctgtgacagtgtcctccggtggtggtggttctggcggcggcggctccggtggtggtggttctgatattatgatgagtcagtcccccagcagcctgaccgtgtccgtgggcgagaaggtgaccgtgtcttgcaagagcagccagagcctgctgtacaccagcagccagaagaactatctggcttggtatcagcagaagcccggccagagcccaaagctgctgatctactgggccagcacccgggagagcggagtgcccgacagattcaccggcagcggctccggcacagacttcaccctgaccatcaccagcgtgaaggccgacgacctggccgtgtactactgccagcagtactacgcctacccctggaccttcggcggagggaccaagctggagatcaagtccggaggtggtggatccgaggtgcagctggtcgagtctggaggaggattggtgcagcctggagggtcattgaaactctcatgtgcagcctctggattcaccttcaataagtacgccatgaactgggtccgccaggctccaggaaagggtttggaatgggttgctcgcataagaagtaaatataataattatgcaacatattatgccgattcagtgaaagacaggttcaccatctccagagatgattcaaaaaacactgcctatctacaaatgaacaacttgaaaactgaggacactgccgtgtactactgtgtgagacatgggaacttcggtaatagctacatatcctactgggcttactggggccaagggactctggtcaccgtctcctcaggtggtggtggttctggcggcggcggctccggtggtggtggttctcagactgttgtgactcaggaaccttcactcaccgtatcacctggtggaacagtcacactcacttgtggctcctcgactggggctgttacatctggcaactacccaaactgggtccaacaaaaaccaggtcaggcaccccgtggtctaataggtgggactaagttcctcgcccccggtactcctgccagattctcaggctccctgcttggaggcaaggctgccctcaccctctcaggggtacagccagaggatgaggcagaatattactgtgttctatggtacagcaaccgctgggtgttcggtggaggaaccaaactgactgtccta

SEQ ID NO: 831 - protein, 501 aa, Artificial Sequence
  MET-1 LH x I2C HL
DIMMSQSPSSLTVSVGEKVTVSCKSSQSLLYTSSQKNYLAWYQQKPGQSPKLLIYWASTRESGVPDRFTGSGSGTDFTLTITSVKADDLAVYYCQQYYAYPWTFGGGTKLEIKGGGGSGGGGSGGGGSQVQLQQSGPELVRPGASVKMSCRASGYTFTSYWLHWVKQRPGQGLEWIGMIDPSNSDTRFNPNFKDKATLNVDRSSNTAYMLLSSLTSADSAVYYCATYGSYVSPLDYWGQGTSVTVSSGGGGSEVQLVESGGGLVQPGGSLKLSCAASGFTFNKYAMNWVRQAPGKGLEWVARIRSKYNNYATYYADSVKDRFTISRDDSKNTAYLQMNNLKTEDTAVYYCVRHGNFGNSYISYWAYWGQGTLVTVSSGGGGSGGGGSGGGGSQTVVTQEPSLTVSPGGTVTLTCGSSTGAVTSGNYPNWVQQKPGQAPRGLIGGTKFLAPGTPARFSGSLLGGKAALTLSGVQPEDEAEYYCVLWYSNRWVFGGGTKLTVL

SEQ ID NO: 832 - DNA, 1503 bp, Artificial Sequence
  MET-1 LH x I2C HL
gatattatgatgagtcagtcccccagcagcctgaccgtgtccgtgggcgagaaggtgaccgtgtcttgcaagagcagccagagcctgctgtacaccagcagccagaagaactatctggcttggtatcagcagaagcccggccagagcccaaagctgctgatctactgggccagcacccgggagagcggagtgcccgacagattcaccggcagcggctccggcacagacttcaccctgaccatcaccagcgtgaaggccgacgacctggccgtgtactactgccagcagtactacgcctacccctggaccttcggcggagggaccaagctggagatcaagggtggtggtggttctggcggcggcggctccggtggtggtggttctcaggtgcagctgcagcagagcggacccgagctggtgcggccaggcgcctccgtgaagatgagctgcagggccagcggctacaccttcaccagctactggctgcactgggtgaaacagagacctggacagggactggagtggatcggcatgatcgaccccagcaacagcgacaccaggttcaaccccaacttcaaggacaaggccaccctgaacgtggacaggtccagcaacaccgcctacatgctgctgtccagcctgacctctgccgacagcgccgtgtattactgtgccacctacggcagctacgtgtcccccctggactactggggccagggcacctctgtgacagtgtcctccggaggtggtggatccgaggtgcagctggtcgagtctggaggaggattggtgcagcctggagggtcattgaaactctcatgtgcagcctctggattcaccttcaataagtacgccatgaactgggtccgccaggctccaggaaagggtttggaatgggttgctcgcataagaagtaaatataataattatgcaacatattatgccgattcagtgaaagacaggttcaccatctccagagatgattcaaaaaacactgcctatctacaaatgaacaacttgaaaactgaggacactgccgtgtactactgtgtgagacatgggaacttcggtaatagctacatatcctactgggcttactggggccaagggactctggtcaccgtctcctcaggtggtggtggttctggcggcggcggctccggtggtggtggttctcagactgttgtgactcaggaaccttcactcaccgtatcacctggtggaacagtcacactcacttgtggctcctcgactggggctgttacatctggcaactacccaaactgggtccaacaaaaaccaggtcaggcaccccgtggtctaataggtgggactaagttcctcgcccccggtactcctgccagattctcaggctccctgcttggaggcaaggctgccctcaccctctcaggggtacagccagaggatgaggcagaatattactgtgttctatggtacagcaaccgctgggtgttcggtggaggaaccaaactgactgtccta

SEQ ID NO: 833 - protein, 15 aa, Artificial Sequence
  MET-3 L-CDR1
KASQSVDYDGGSYMS

SEQ ID NO: 834 - protein, 7 aa, Artificial Sequence
  MET-3 L-CDR2
AASNLES

SEQ ID NO: 835 - protein, 9 aa, Artificial Sequence
  MET-3 L-CDR3
QQSYEDPLT

SEQ ID NO: 836 - protein, 5 aa, Artificial Sequence
  MET-3 H-CDR1
SYWIH

SEQ ID NO: 837 - protein, 17 aa, Artificial Sequence
  MET-3 H-CDR2
EINPSSGRTNYNEKFKN

SEQ ID NO: 838 - protein, 3 aa, Artificial Sequence
  MET-3 H-CDR3
RGY

SEQ ID NO: 839 - protein, 107 aa, Artificial Sequence
  MET 4 L
DIQMTQSPSSVSASVGDRVTITCRASQGINTWLAWYQQKPGKAPKLLIYAASSLKSGVPSRFSGSGSGADFTLTISSLQPEDFATYYCQQANSFPLTFGGGTKVEIK

SEQ ID NO: 840 - protein, 11 aa, Artificial Sequence
  MET-4 L-CDR1
RASQGINTWLA

SEQ ID NO: 841 - protein, 7 aa, Artificial Sequence
  MET-4 L-CDR2
AASSLKS

SEQ ID NO: 842 - protein, 9 aa, Artificial Sequence
  MET-4 L-CDR3
QQANSFPLT

SEQ ID NO: 843 - DNA, 321 bp, Artificial Sequence
  MET-4 L
gacatccagatgacccagagccccagcagcgtgtctgccagcgtgggcgacagagtgaccatcacatgtagagctagccagggcatcaacacctggctggcctggtatcagcagaagcccggcaaggcccccaagctgctgatctacgccgcttcctccctgaaatctggcgtgcccagcagattcagcggcagcggaagcggagccgacttcaccctgaccatcagcagcctgcagcccgaggacttcgccacctactactgccagcaggccaacagcttccccctgaccttcggcggagggaccaaggtggagatcaag

SEQ ID NO: 844 - protein, 117 aa, Artificial Sequence
  MET-4 H
QVQLVQSGAEVKKPGASVKVSCEASGYTFTSYGFSWVRQAPGQGLEWMGWISASNGNTYYAQKLQGRVTMTTDTSTSSAYMELRSLRSDDTAVYYCARVYADYADYWGQGTLVTVSS

SEQ ID NO: 845 - protein, 5 aa, Artificial Sequence
  MET-4 H-CDR1
SYGFS

SEQ ID NO: 846 - protein, 17 aa, Artificial Sequence
  MET-4 H-CDR2
WISASNGNTYYAQKLQG

SEQ ID NO: 847 - protein, 8 aa, Artificial Sequence
  MET-4 H-CDR3
VYADYADY

SEQ ID NO: 848 - DNA, 351 bp, Artificial Sequence
  MET-4 H
caggtgcagctggtgcagagcggcgctgaggtgaagaagccaggcgccagcgtcaaggtgtcctgcgaggccagcggctacaccttcaccagctacggcttcagctgggtgcggcaggctcctggacagggactggaatggatgggctggatcagcgccagcaacggcaacacctactacgcccagaagctgcagggccgcgtcaccatgaccaccgacaccagcaccagcagcgcctacatggagctgagaagcctgagatccgacgacaccgccgtgtactactgcgccagggtgtacgccgactacgctgactactggggccagggcaccctggtgacagtgtcttcc

SEQ ID NO: 849 - protein, 239 aa, Artificial Sequence
  MET-4 HL
QVQLVQSGAEVKKPGASVKVSCEASGYTFTSYGFSWVRQAPGQGLEWMGWISASNGNTYYAQKLQGRVTMTTDTSTSSAYMELRSLRSDDTAVYYCARVYADYADYWGQGTLVTVSSGGGGSGGGGSGGGGSDIQMTQSPSSVSASVGDRVTITCRASQGINTWLAWYQQKPGKAPKLLIYAASSLKSGVPSRFSGSGSGADFTLTISSLQPEDFATYYCQQANSFPLTFGGGTKVEIK

SEQ ID NO: 850 - DNA, 717 bp, Artificial Sequence
  MET-4 HL
caggtgcagctggtgcagagcggcgctgaggtgaagaagccaggcgccagcgtcaaggtgtcctgcgaggccagcggctacaccttcaccagctacggcttcagctgggtgcggcaggctcctggacagggactggaatggatgggctggatcagcgccagcaacggcaacacctactacgcccagaagctgcagggccgcgtcaccatgaccaccgacaccagcaccagcagcgcctacatggagctgagaagcctgagatccgacgacaccgccgtgtactactgcgccagggtgtacgccgactacgctgactactggggccagggcaccctggtgacagtgtcttccggtggtggtggttctggcggcggcggctccggtggtggtggttctgacatccagatgacccagagccccagcagcgtgtctgccagcgtgggcgacagagtgaccatcacatgtagagctagccagggcatcaacacctggctggcctggtatcagcagaagcccggcaaggcccccaagctgctgatctacgccgcttcctccctgaaatctggcgtgcccagcagattcagcggcagcggaagcggagccgacttcaccctgaccatcagcagcctgcagcccgaggacttcgccacctactactgccagcaggccaacagcttccccctgaccttcggcggagggaccaaggtggagatcaag

SEQ ID NO: 851 - protein, 239 aa, Artificial Sequence
  MET-4 LH
DIQMTQSPSSVSASVGDRVTITCRASQGINTWLAWYQQKPGKAPKLLIYAASSLKSGVPSRFSGSGSGADFTLTISSLQPEDFATYYCQQANSFPLTFGGGTKVEIKGGGGSGGGGSGGGGSQVQLVQSGAEVKKPGASVKVSCEASGYTFTSYGFSWVRQAPGQGLEWMGWISASNGNTYYAQKLQGRVTMTTDTSTSSAYMELRSLRSDDTAVYYCARVYADYADYWGQGTLVTVSS

SEQ ID NO: 852 - DNA, 717 bp, Artificial Sequence
  MET-4 LH
gacatccagatgacccagagccccagcagcgtgtctgccagcgtgggcgacagagtgaccatcacatgtagagctagccagggcatcaacacctggctggcctggtatcagcagaagcccggcaaggcccccaagctgctgatctacgccgcttcctccctgaaatctggcgtgcccagcagattcagcggcagcggaagcggagccgacttcaccctgaccatcagcagcctgcagcccgaggacttcgccacctactactgccagcaggccaacagcttccccctgaccttcggcggagggaccaaggtggagatcaagggtggtggtggttctggcggcggcggctccggtggtggtggttctcaggtgcagctggtgcagagcggcgctgaggtgaagaagccaggcgccagcgtcaaggtgtcctgcgaggccagcggctacaccttcaccagctacggcttcagctgggtgcggcaggctcctggacagggactggaatggatgggctggatcagcgccagcaacggcaacacctactacgcccagaagctgcagggccgcgtcaccatgaccaccgacaccagcaccagcagcgcctacatggagctgagaagcctgagatccgacgacaccgccgtgtactactgcgccagggtgtacgccgactacgctgactactggggccagggcaccctggtgacagtgtcttcc

SEQ ID NO: 853 - protein, 494 aa, Artificial Sequence
  MET-4 HL x I2C HL
QVQLVQSGAEVKKPGASVKVSCEASGYTFTSYGFSWVRQAPGQGLEWMGWISASNGNTYYAQKLQGRVTMTTDTSTSSAYMELRSLRSDDTAVYYCARVYADYADYWGQGTLVTVSSGGGGSGGGGSGGGGSDIQMTQSPSSVSASVGDRVTITCRASQGINTWLAWYQQKPGKAPKLLIYAASSLKSGVPSRFSGSGSGADFTLTISSLQPEDFATYYCQQANSFPLTFGGGTKVEIKSGGGGSEVQLVESGGGLVQPGGSLKLSCAASGFTFNKYAMNWVRQAPGKGLEWVARIRSKYNNYATYYADSVKDRFTISRDDSKNTAYLQMNNLKTEDTAVYYCVRHGNFGNSYISYWAYWGQGTLVTVSSGGGGSGGGGSGGGGSQTVVTQEPSLTVSPGGTVTLTCGSSTGAVTSGNYPNWVQQKPGQAPRGLIGGTKFLAPGTPARFSGSLLGGKAALTLSGVQPEDEAEYYCVLWYSNRWVFGGGTKLTVL

SEQ ID NO: 854 - DNA, 1482 bp, Artificial Sequence
  MET-4 HL x I2C HL
caggtgcagctggtgcagagcggcgctgaggtgaagaagccaggcgccagcgtcaaggtgtcctgcgaggccagcggctacaccttcaccagctacggcttcagctgggtgcggcaggctcctggacagggactggaatggatgggctggatcagcgccagcaacggcaacacctactacgcccagaagctgcagggccgcgtcaccatgaccaccgacaccagcaccagcagcgcctacatggagctgagaagcctgagatccgacgacaccgccgtgtactactgcgccagggtgtacgccgactacgctgactactggggccagggcaccctggtgacagtgtcttccggtggtggtggttctggcggcggcggctccggtggtggtggttctgacatccagatgacccagagccccagcagcgtgtctgccagcgtgggcgacagagtgaccatcacatgtagagctagccagggcatcaacacctggctggcctggtatcagcagaagcccggcaaggcccccaagctgctgatctacgccgcttcctccctgaaatctggcgtgcccagcagattcagcggcagcggaagcggagccgacttcaccctgaccatcagcagcctgcagcccgaggacttcgccacctactactgccagcaggccaacagcttccccctgaccttcggcggagggaccaaggtggagatcaagtccggaggtggtggatccgaggtgcagctggtcgagtctggaggaggattggtgcagcctggagggtcattgaaactctcatgtgcagcctctggattcaccttcaataagtacgccatgaactgggtccgccaggctccaggaaagggtttggaatgggttgctcgcataagaagtaaatataataattatgcaacatattatgccgattcagtgaaagacaggttcaccatctccagagatgattcaaaaaacactgcctatctacaaatgaacaacttgaaaactgaggacactgccgtgtactactgtgtgagacatgggaacttcggtaatagctacatatcctactgggcttactggggccaagggactctggtcaccgtctcctcaggtggtggtggttctggcggcggcggctccggtggtggtggttctcagactgttgtgactcaggaaccttcactcaccgtatcacctggtggaacagtcacactcacttgtggctcctcgactggggctgttacatctggcaactacccaaactgggtccaacaaaaaccaggtcaggcaccccgtggtctaataggtgggactaagttcctcgcccccggtactcctgccagattctcaggctccctgcttggaggcaaggctgccctcaccctctcaggggtacagccagaggatgaggcagaatattactgtgttctatggtacagcaaccgctgggtgttcggtggaggaaccaaactgactgtccta

SEQ ID NO: 855 - protein, 493 aa, Artificial Sequence
  MET-4 LH x I2C HL
DIQMTQSPSSVSASVGDRVTITCRASQGINTWLAWYQQKPGKAPKLLIYAASSLKSGVPSRFSGSGSGADFTLTISSLQPEDFATYYCQQANSFPLTFGGGTKVEIKGGGGSGGGGSGGGGSQVQLVQSGAEVKKPGASVKVSCEASGYTFTSYGFSWVRQAPGQGLEWMGWISASNGNTYYAQKLQGRVTMTTDTSTSSAYMELRSLRSDDTAVYYCARVYADYADYWGQGTLVTVSSGGGGSEVQLVESGGGLVQPGGSLKLSCAASGFTFNKYAMNWVRQAPGKGLEWVARIRSKYNNYATYYADSVKDRFTISRDDSKNTAYLQMNNLKTEDTAVYYCVRHGNFGNSYISYWAYWGQGTLVTVSSGGGGSGGGGSGGGGSQTVVTQEPSLTVSPGGTVTLTCGSSTGAVTSGNYPNWVQQKPGQAPRGLIGGTKFLAPGTPARFSGSLLGGKAALTLSGVQPEDEAEYYCVLWYSNRWVFGGGTKLTVL

SEQ ID NO: 856 - DNA, 1479 bp, Artificial Sequence
  MET-4 LH x I2C HL
gacatccagatgacccagagccccagcagcgtgtctgccagcgtgggcgacagagtgaccatcacatgtagagctagccagggcatcaacacctggctggcctggtatcagcagaagcccggcaaggcccccaagctgctgatctacgccgcttcctccctgaaatctggcgtgcccagcagattcagcggcagcggaagcggagccgacttcaccctgaccatcagcagcctgcagcccgaggacttcgccacctactactgccagcaggccaacagcttccccctgaccttcggcggagggaccaaggtggagatcaagggtggtggtggttctggcggcggcggctccggtggtggtggttctcaggtgcagctggtgcagagcggcgctgaggtgaagaagccaggcgccagcgtcaaggtgtcctgcgaggccagcggctacaccttcaccagctacggcttcagctgggtgcggcaggctcctggacagggactggaatggatgggctggatcagcgccagcaacggcaacacctactacgcccagaagctgcagggccgcgtcaccatgaccaccgacaccagcaccagcagcgcctacatggagctgagaagcctgagatccgacgacaccgccgtgtactactgcgccagggtgtacgccgactacgctgactactggggccagggcaccctggtgacagtgtcttccggaggtggtggatccgaggtgcagctggtcgagtctggaggaggattggtgcagcctggagggtcattgaaactctcatgtgcagcctctggattcaccttcaataagtacgccatgaactgggtccgccaggctccaggaaagggtttggaatgggttgctcgcataagaagtaaatataataattatgcaacatattatgccgattcagtgaaagacaggttcaccatctccagagatgattcaaaaaacactgcctatctacaaatgaacaacttgaaaactgaggacactgccgtgtactactgtgtgagacatgggaacttcggtaatagctacatatcctactgggcttactggggccaagggactctggtcaccgtctcctcaggtggtggtggttctggcggcggcggctccggtggtggtggttctcagactgttgtgactcaggaaccttcactcaccgtatcacctggtggaacagtcacactcacttgtggctcctcgactggggctgttacatctggcaactacccaaactgggtccaacaaaaaccaggtcaggcaccccgtggtctaataggtgggactaagttcctcgcccccggtactcctgccagattctcaggctccctgcttggaggcaaggctgccctcaccctctcaggggtacagccagaggatgaggcagaatattactgtgttctatggtacagcaaccgctgggtgttcggtggaggaaccaaactgactgtccta

SEQ ID NO: 857 - protein, 109 aa, Artificial Sequence
  MET-5 L
EIVLTQSPGTLSLSPGERATLSCRASQSVSNNYLAWYQQKPGQAPRLLIFGASSRATGIPDRFSGSGSGTDFTLTISRLEPEDFAVYYCQQYDISPMYSFGQGTKLEMK

SEQ ID NO: 858 - protein, 12 aa, Artificial Sequence
  MET-5 L-CDR1
RASQSVSNNYLA

SEQ ID NO: 859 - protein, 7 aa, Artificial Sequence
  MET-5 L-CDR2
GASSRAT

SEQ ID NO: 860 - protein, 10 aa, Artificial Sequence
  MET-5 L-CDR3
QQYDISPMYS

SEQ ID NO: 861 - DNA, 327 bp, Artificial Sequence
  MET-5 L
gagatcgtgctgacccagagcccaggcaccctgagcctgagcccaggcgagagagccaccctgagctgcagagccagccagagcgtgtccaacaactatctggcttggtatcagcagaaaccaggacaggctcccagactgctgatcttcggcgccagctctagagccaccggcatccccgacagattcagtggtagcggctccggcacagacttcaccctgaccatttccagactggaacccgaggacttcgccgtgtactactgccagcagtacgacatcagccccatgtacagcttcggccagggcaccaagctggagatgaag

SEQ ID NO: 862 - protein, 135 aa, Artificial Sequence
  MET-5 H
QVQLQESGPGLVKPSQTLSLTCTVSGGSISSGGYYWSWIRQHPGKGLEWIGYIYYSGSTYYNPSLKSRVTISVDTSKNQFSLKLSSVTAADTAVYYCARDGPLGYCSSTSCPVTGEYYYYGMDVWGQGTTVTVSS

SEQ ID NO: 863 - protein, 7 aa, Artificial Sequence
  MET-5 H-CDR1
SGGYYWS

SEQ ID NO: 864 - protein, 16 aa, Artificial Sequence
  MET-5 H-CDR2
YIYYSGSTYYNPSLKS

SEQ ID NO: 865 - protein, 25 aa, Artificial Sequence
  MET-5 H-CDR3
DGPLGYCSSTSCPVTGEYYYYGMDV

SEQ ID NO: 866 - DNA, 405 bp, Artificial Sequence
  MET-5 H
caggtgcagctgcaggagagcgggcctggactggtgaagcccagccagaccctgtctctgacctgcaccgtgtccggcggcagcatcagcagcggcggctactactggtcctggatcaggcagcacccaggcaagggcctggagtggatcggctacatctactattctggatccacctactacaaccccagcctgaagtccagagtgaccatctccgtggacaccagcaagaaccagttcagcctgaagctgtccagcgtgacagccgccgacaccgccgtgtattattgcgccagggacggcccactgggatattgttcctccacatcctgcccagtgaccggcgagtactactactacggcatggacgtgtggggacagggcaccaccgtgaccgtgtcttcc

SEQ ID NO: 867 - protein, 259 aa, Artificial Sequence
  MET-5 HL
QVQLQESGPGLVKPSQTLSLTCTVSGGSISSGGYYWSWIRQHPGKGLEWIGYIYYSGSTYYNPSLKSRVTISVDTSKNQFSLKLSSVTAADTAVYYCARDGPLGYCSSTSCPVTGEYYYYGMDVWGQGTTVTVSSGGGGSGGGGSGGGGSEIVLTQSPGTLSLSPGERATLSCRASQSVSNNYLAWYQQKPGQAPRLLIFGASSRATGIPDRFSGSGSGTDFTLTISRLEPEDFAVYYCQQYDISPMYSFGQGTKLEMK

SEQ ID NO: 868 - DNA, 777 bp, Artificial Sequence
  MET-5 HL
caggtgcagctgcaggagagcgggcctggactggtgaagcccagccagaccctgtctctgacctgcaccgtgtccggcggcagcatcagcagcggcggctactactggtcctggatcaggcagcacccaggcaagggcctggagtggatcggctacatctactattctggatccacctactacaaccccagcctgaagtccagagtgaccatctccgtggacaccagcaagaaccagttcagcctgaagctgtccagcgtgacagccgccgacaccgccgtgtattattgcgccagggacggcccactgggatattgttcctccacatcctgcccagtgaccggcgagtactactactacggcatggacgtgtggggacagggcaccaccgtgaccgtgtcttccggtggtggtggttctggcggcggcggctccggtggtggtggttctgagatcgtgctgacccagagcccaggcaccctgagcctgagcccaggcgagagagccaccctgagctgcagagccagccagagcgtgtccaacaactatctggcttggtatcagcagaaaccaggacaggctcccagactgctgatcttcggcgccagctctagagccaccggcatccccgacagattcagtggtagcggctccggcacagacttcaccctgaccatttccagactggaacccgaggacttcgccgtgtactactgccagcagtacgacatcagccccatgtacagcttcggccagggcaccaagctggagatgaag

SEQ ID NO: 869 - protein, 259 aa, Artificial Sequence
  MET-5 LH
EIVLTQSPGTLSLSPGERATLSCRASQSVSNNYLAWYQQKPGQAPRLLIFGASSRATGIPDRFSGSGSGTDFTLTISRLEPEDFAVYYCQQYDISPMYSFGQGTKLEMKGGGGSGGGGSGGGGSQVQLQESGPGLVKPSQTLSLTCTVSGGSISSGGYYWSWIRQHPGKGLEWIGYIYYSGSTYYNPSLKSRVTISVDTSKNQFSLKLSSVTAADTAVYYCARDGPLGYCSSTSCPVTGEYYYYGMDVWGQGTTVTVSS

SEQ ID NO: 870 - DNA, 777 bp, Artificial Sequence
  MET-5 LH
gagatcgtgctgacccagagcccaggcaccctgagcctgagcccaggcgagagagccaccctgagctgcagagccagccagagcgtgtccaacaactatctggcttggtatcagcagaaaccaggacaggctcccagactgctgatcttcggcgccagctctagagccaccggcatccccgacagattcagtggtagcggctccggcacagacttcaccctgaccatttccagactggaacccgaggacttcgccgtgtactactgccagcagtacgacatcagccccatgtacagcttcggccagggcaccaagctggagatgaagggtggtggtggttctggcggcggcggctccggtggtggtggttctcaggtgcagctgcaggagagcgggcctggactggtgaagcccagccagaccctgtctctgacctgcaccgtgtccggcggcagcatcagcagcggcggctactactggtcctggatcaggcagcacccaggcaagggcctggagtggatcggctacatctactattctggatccacctactacaaccccagcctgaagtccagagtgaccatctccgtggacaccagcaagaaccagttcagcctgaagctgtccagcgtgacagccgccgacaccgccgtgtattattgcgccagggacggcccactgggatattgttcctccacatcctgcccagtgaccggcgagtactactactacggcatggacgtgtggggacagggcaccaccgtgaccgtgtcttcc

SEQ ID NO: 871 - protein, 514 aa, Artificial Sequence
  MET-5 HL x I2C HL
QVQLQESGPGLVKPSQTLSLTCTVSGGSISSGGYYWSWIRQHPGKGLEWIGYIYYSGSTYYNPSLKSRVTISVDTSKNQFSLKLSSVTAADTAVYYCARDGPLGYCSSTSCPVTGEYYYYGMDVWGQGTTVTVSSGGGGSGGGGSGGGGSEIVLTQSPGTLSLSPGERATLSCRASQSVSNNYLAWYQQKPGQAPRLLIFGASSRATGIPDRFSGSGSGTDFTLTISRLEPEDFAVYYCQQYDISPMYSFGQGTKLEMKSGGGGSEVQLVESGGGLVQPGGSLKLSCAASGFTFNKYAMNWVRQAPGKGLEWVARIRSKYNNYATYYADSVKDRFTISRDDSKNTAYLQMNNLKTEDTAVYYCVRHGNFGNSYISYWAYWGQGTLVTVSSGGGGSGGGGSGGGGSQTVVTQEPSLTVSPGGTVTLTCGSSTGAVTSGNYPNWVQQKPGQAPRGLIGGTKFLAPGTPARFSGSLLGGKAALTLSGVQPEDEAEYYCVLWYSNRWVFGGGTKLTVL

SEQ ID NO: 872 - DNA, 1542 bp, Artificial Sequence
  MET-5 HL x I2C HL
caggtgcagctgcaggagagcgggcctggactggtgaagcccagccagaccctgtctctgacctgcaccgtgtccggcggcagcatcagcagcggcggctactactggtcctggatcaggcagcacccaggcaagggcctggagtggatcggctacatctactattctggatccacctactacaaccccagcctgaagtccagagtgaccatctccgtggacaccagcaagaaccagttcagcctgaagctgtccagcgtgacagccgccgacaccgccgtgtattattgcgccagggacggcccactgggatattgttcctccacatcctgcccagtgaccggcgagtactactactacggcatggacgtgtggggacagggcaccaccgtgaccgtgtcttccggtggtggtggttctggcggcggcggctccggtggtggtggttctgagatcgtgctgacccagagcccaggcaccctgagcctgagcccaggcgagagagccaccctgagctgcagagccagccagagcgtgtccaacaactatctggcttggtatcagcagaaaccaggacaggctcccagactgctgatcttcggcgccagctctagagccaccggcatccccgacagattcagtggtagcggctccggcacagacttcaccctgaccatttccagactggaacccgaggacttcgccgtgtactactgccagcagtacgacatcagccccatgtacagcttcggccagggcaccaagctggagatgaagtccggaggtggtggatccgaggtgcagctggtcgagtctggaggaggattggtgcagcctggagggtcattgaaactctcatgtgcagcctctggattcaccttcaataagtacgccatgaactgggtccgccaggctccaggaaagggtttggaatgggttgctcgcataagaagtaaatataataattatgcaacatattatgccgattcagtgaaagacaggttcaccatctccagagatgattcaaaaaacactgcctatctacaaatgaacaacttgaaaactgaggacactgccgtgtactactgtgtgagacatgggaacttcggtaatagctacatatcctactgggcttactggggccaagggactctggtcaccgtctcctcaggtggtggtggttctggcggcggcggctccggtggtggtggttctcagactgttgtgactcaggaaccttcactcaccgtatcacctggtggaacagtcacactcacttgtggctcctcgactggggctgttacatctggcaactacccaaactgggtccaacaaaaaccaggtcaggcaccccgtggtctaataggtgggactaagttcctcgcccccggtactcctgccagattctcaggctccctgcttggaggcaaggctgccctcaccctctcaggggtacagccagaggatgaggcagaatattactgtgttctatggtacagcaaccgctgggtgttcggtggaggaaccaaactgactgtccta

SEQ ID NO: 873 - protein, 513 aa, Artificial Sequence [sequence omitted]

SEQ ID NO: 874 - DNA, 1539 bp, Artificial Sequence
  MET-5 LH x I2C HL
gagatcgtgctgacccagagcccaggcaccctgagcctgagcccaggcgagagagccaccctgagctgcagagccagccagagcgtgtccaacaactatctggcttggtatcagcagaaaccaggacaggctcccagactgctgatcttcggcgccagctctagagccaccggcatccccgacagattcagtggtagcggctccggcacagacttcaccctgaccatttccagactggaacccgaggacttcgccgtgtactactgccagcagtacgacatcagccccatgtacagcttcggccagggcaccaagctggagatgaagggtggtggtggttctggcggcggcggctccggtggtggtggttctcaggtgcagctgcaggagagcgggcctggactggtgaagcccagccagaccctgtctctgacctgcaccgtgtccggcggcagcatcagcagcggcggctactactggtcctggatcaggcagcacccaggcaagggcctggagtggatcggctacatctactattctggatccacctactacaaccccagcctgaagtccagagtgaccatctccgtggacaccagcaagaaccagttcagcctgaagctgtccagcgtgacagccgccgacaccgccgtgtattattgcgccagggacggcccactgggatattgttcctccacatcctgcccagtgaccggcgagtactactactacggcatggacgtgtggggacagggcaccaccgtgaccgtgtcttccggaggtggtggatccgaggtgcagctggtcgagtctggaggaggattggtgcagcctggagggtcattgaaactctcatgtgcagcctctggattcaccttcaataagtacgccatgaactgggtccgccaggctccaggaaagggtttggaatgggttgctcgcataagaagtaaatataataattatgcaacatattatgccgattcagtgaaagacaggttcaccatctccagagatgattcaaaaaacactgcctatctacaaatgaacaacttgaaaactgaggacactgccgtgtactactgtgtgagacatgggaacttcggtaatagctacatatcctactgggcttactggggccaagggactctggtcaccgtctcctcaggtggtggtggttctggcggcggcggctccggtggtggtggttctcagactgttgtgactcaggaaccttcactcaccgtatcacctggtggaacagtcacactcacttgtggctcctcgactggggctgttacatctggcaactacccaaactgggtccaacaaaaaccaggtcaggcaccccgtggtctaataggtgggactaagttcctcgcccccggtactcctgccagattctcaggctccctgcttggaggcaaggctgccctcaccctctcaggggtacagccagaggatgaggcagaatattactgtgttctatggtacagcaaccgctgggtgttcggtggaggaaccaaactgactgtccta

SEQ ID NO: 875 - protein, 107 aa, Artificial Sequence
  MET-6 L
DIQMTQSPSSVSASVGDRVTITCRASQGISSWLAWYQQKPGKAPKLLIYAASSLQSGVPSRFSGSGSGTDFTLTISSLQSEDFATYYCQQANSFPITFGPGTKVEIK

SEQ ID NO: 876 - protein, 11 aa, Artificial Sequence
  MET-6 L-CDR1
RASQGISSWLA

SEQ ID NO: 877 - protein, 7 aa, Artificial Sequence
  MET-6 L-CDR2
AASSLQS

SEQ ID NO: 878 - protein, 9 aa, Artificial Sequence
  MET-6 L-CDR3
QQANSFPIT

SEQ ID NO: 879 - DNA, 321 bp, Artificial Sequence
  MET-6 L
gacatccagatgacccagagccccagcagcgtgtctgccagcgtgggcgacagagtgaccatcacctgcagagcttcccagggcatctctagctggctggcctggtatcagcagaagcccggcaaggcccccaagctcctgatctatgctgcttccagcctgcagagcggcgtgcccagcagattcagcggcagcggctccggcacagacttcaccctgaccatcagctccctgcagtccgaggacttcgccacctactactgccagcaggccaacagcttccccatcaccttcggcccaggcaccaaggtggagatcaag

SEQ ID NO: 880 - protein, 118 aa, Artificial Sequence
  MET-6 H
QLQLQESGPGLVKPSETLSLTCTVSGGSISSSSYYGGWIRQPPGKGLDWIGSIYYSGNTYYNPSLKSRVTISVDTSKNQFSLKLSSVTAADTAVYYCARHSWDYFDYWDQGTLVTVSS

SEQ ID NO: 881 - protein, 7 aa, Artificial Sequence
  MET-6 H-CDR1
SSSYYGG

SEQ ID NO: 882 - protein, 16 aa, Artificial Sequence
  MET-6 H-CDR2
SIYYSGNTYYNPSLKS

SEQ ID NO: 883 - protein, 8 aa, Artificial Sequence
  MET-6 H-CDR3
HSWDYFDY

SEQ ID NO: 884 - DNA, 354 bp, Artificial Sequence
  MET-6 H
cagctccagctccaggagagcgggcctggactggtgaagcccagcgagacactgagcctgacctgcaccgtgtccggcggcagcatcagcagcagcagctactacggcggctggatcagacagccacccggcaaaggactggattggatcggatccatctattatagtggaaacacctactacaaccccagcctgaagtcccgcgtgaccatctccgtggacaccagcaagaaccagttcagcctgaagctgtccagcgtgacagccgccgacaccgccgtgtactactgcgccaggcacagctgggactacttcgactactgggaccagggcaccctggtgaccgtgtcttcc

SEQ ID NO: 885 - protein, 240 aa, Artificial Sequence
  MET-6 HL
QLQLQESGPGLVKPSETLSLTCTVSGGSISSSSYYGGWIRQPPGKGLDWIGSIYYSGNTYYNPSLKSRVTISVDTSKNQFSLKLSSVTAADTAVYYCARHSWDYFDYWDQGTLVTVSSGGGGSGGGGSGGGGSDIQMTQSPSSVSASVGDRVTITCRASQGISSWLAWYQQKPGKAPKLLIYAASSLQSGVPSRFSGSGSGTDFTLTISSLQSEDFATYYCQQANSFPITFGPGTKVEIK

SEQ ID NO: 886 - DNA, 720 bp, Artificial Sequence
  MET-6 HL
cagctccagctccaggagagcgggcctggactggtgaagcccagcgagacactgagcctgacctgcaccgtgtccggcggcagcatcagcagcagcagctactacggcggctggatcagacagccacccggcaaaggactggattggatcggatccatctattatagtggaaacacctactacaaccccagcctgaagtcccgcgtgaccatctccgtggacaccagcaagaaccagttcagcctgaagctgtccagcgtgacagccgccgacaccgccgtgtactactgcgccaggcacagctgggactacttcgactactgggaccagggcaccctggtgaccgtgtcttccggtggtggtggttctggcggcggcggctccggtggtggtggttctgacatccagatgacccagagccccagcagcgtgtctgccagcgtgggcgacagagtgaccatcacctgcagagcttcccagggcatctctagctggctggcctggtatcagcagaagcccggcaaggcccccaagctcctgatctatgctgcttccagcctgcagagcggcgtgcccagcagattcagcggcagcggctccggcacagacttcaccctgaccatcagctccctgcagtccgaggacttcgccacctactactgccagcaggccaacagcttccccatcaccttcggcccaggcaccaaggtggagatcaag

SEQ ID NO: 887 - protein, 240 aa, Artificial Sequence
  MET-6 LH
DIQMTQSPSSVSASVGDRVTITCRASQGISSWLAWYQQKPGKAPKLLIYAASSLQSGVPSRFSGSGSGTDFTLTISSLQSEDFATYYCQQANSFPITFGPGTKVEIKGGGGSGGGGSGGGGSQLQLQESGPGLVKPSETLSLTCTVSGGSISSSSYYGGWIRQPPGKGLDWIGSIYYSGNTYYNPSLKSRVTISVDTSKNQFSLKLSSVTAADTAVYYCARHSWDYFDYWDQGTLVTVSS

SEQ ID NO: 888 - DNA, 720 bp, Artificial Sequence
  MET-6 LH
gacatccagatgacccagagccccagcagcgtgtctgccagcgtgggcgacagagtgaccatcacctgcagagcttcccagggcatctctagctggctggcctggtatcagcagaagcccggcaaggcccccaagctcctgatctatgctgcttccagcctgcagagcggcgtgcccagcagattcagcggcagcggctccggcacagacttcaccctgaccatcagctccctgcagtccgaggacttcgccacctactactgccagcaggccaacagcttccccatcaccttcggcccaggcaccaaggtggagatcaagggtggtggtggttctggcggcggcggctccggtggtggtggttctcagctccagctccaggagagcgggcctggactggtgaagcccagcgagacactgagcctgacctgcaccgtgtccggcggcagcatcagcagcagcagctactacggcggctggatcagacagccacccggcaaaggactggattggatcggatccatctattatagtggaaacacctactacaaccccagcctgaagtcccgcgtgaccatctccgtggacaccagcaagaaccagttcagcctgaagctgtccagcgtgacagccgccgacaccgccgtgtactactgcgccaggcacagctgggactacttcgactactgggaccagggcaccctggtgaccgtgtcttcc

SEQ ID NO: 889 - protein, 495 aa, Artificial Sequence
  MET-6 HL x I2C HL
QLQLQESGPGLVKPSETLSLTCTVSGGSISSSSYYGGWIRQPPGKGLDWIGSIYYSGNTYYNPSLKSRVTISVDTSKNQFSLKLSSVTAADTAVYYCARHSWDYFDYWDQGTLVTVSSGGGGSGGGGSGGGGSDIQMTQSPSSVSASVGDRVTITCRASQGISSWLAWYQQKPGKAPKLLIYAASSLQSGVPSRFSGSGSGTDFTLTISSLQSEDFATYYCQQANSFPITFGPGTKVEIKSGGGGSEVQLVESGGGLVQPGGSLKLSCAASGFTFNKYAMNWVRQAPGKGLEWVARIRSKYNNYATYYADSVKDRFTISRDDSKNTAYLQMNNLKTEDTAVYYCVRHGNFGNSYISYWAYWGQGTLVTVSSGGGGSGGGGSGGGGSQTVVTQEPSLTVSPGGTVTLTCGSSTGAVTSGNYPNWVQQKPGQAPRGLIGGTKFLAPGTPARFSGSLLGGKAALTLSGVQPEDEAEYYCVLWYSNRWVFGGGTKLTVL

SEQ ID NO: 890 - DNA, 1485 bp, Artificial Sequence
  MET-6 HL x I2C HL
cagctccagctccaggagagcgggcctggactggtgaagcccagcgagacactgagcctgacctgcaccgtgtccggcggcagcatcagcagcagcagctactacggcggctggatcagacagccacccggcaaaggactggattggatcggatccatctattatagtggaaacacctactacaaccccagcctgaagtcccgcgtgaccatctccgtggacaccagcaagaaccagttcagcctgaagctgtccagcgtgacagccgccgacaccgccgtgtactactgcgccaggcacagctgggactacttcgactactgggaccagggcaccctggtgaccgtgtcttccggtggtggtggttctggcggcggcggctccggtggtggtggttctgacatccagatgacccagagccccagcagcgtgtctgccagcgtgggcgacagagtgaccatcacctgcagagcttcccagggcatctctagctggctggcctggtatcagcagaagcccggcaaggcccccaagctcctgatctatgctgcttccagcctgcagagcggcgtgcccagcagattcagcggcagcggctccggcacagacttcaccctgaccatcagctccctgcagtccgaggacttcgccacctactactgccagcaggccaacagcttccccatcaccttcggcccaggcaccaaggtggagatcaagtccggaggtggtggatccgaggtgcagctggtcgagtctggaggaggattggtgcagcctggagggtcattgaaactctcatgtgcagcctctggattcaccttcaataagtacgccatgaactgggtccgccaggctccaggaaagggtttggaatgggttgctcgcataagaagtaaatataataattatgcaacatattatgccgattcagtgaaagacaggttcaccatctccagagatgattcaaaaaacactgcctatctacaaatgaacaacttgaaaactgaggacactgccgtgtactactgtgtgagacatgggaacttcggtaatagctacatatcctactgggcttactggggccaagggactctggtcaccgtctcctcaggtggtggtggttctggcggcggcggctccggtggtggtggttctcagactgttgtgactcaggaaccttcactcaccgtatcacctggtggaacagtcacactcacttgtggctcctcgactggggctgttacatctggcaactacccaaactgggtccaacaaaaaccaggtcaggcaccccgtggtctaataggtgggactaagttcctcgcccccggtactcctgccagattctcaggctccctgcttggaggcaaggctgccctcaccctctcaggggtacagccagaggatgaggcagaatattactgtgttctatggtacagcaaccgctgggtgttcggtggaggaaccaaactgactgtccta

SEQ ID NO: 891 - protein, 494 aa, Artificial Sequence
  MET-6 LH x I2C HL
DIQMTQSPSSVSASVGDRVTITCRASQGISSWLAWYQQKPGKAPKLLIYAASSLQSGVPSRFSGSGSGTDFTLTISSLQSEDFATYYCQQANSFPITFGPGTKVEIKGGGGSGGGGSGGGGSQLQLQESGPGLVKPSETLSLTCTVSGGSISSSSYYGGWIRQPPGKGLDWIGSIYYSGNTYYNPSLKSRVTISVDTSKNQFSLKLSSVTAADTAVYYCARHSWDYFDYWDQGTLVTVSSGGGGSEVQLVESGGGLVQPGGSLKLSCAASGFTFNKYAMNWVRQAPGKGLEWVARIRSKYNNYATYYADSVKDRFTISRDDSKNTAYLQMNNLKTEDTAVYYCVRHGNFGNSYISYWAYWGQGTLVTVSSGGGGSGGGGSGGGGSQTVVTQEPSLTVSPGGTVTLTCGSSTGAVTSGNYPNWVQQKPGQAPRGLIGGTKFLAPGTPARFSGSLLGGKAALTLSGVQPEDEAEYYCVLWYSNRWVFGGGTKLTVL

SEQ ID NO: 892 - DNA, 1482 bp, Artificial Sequence
  MET-6 LH x I2C HL
gacatccagatgacccagagccccagcagcgtgtctgccagcgtgggcgacagagtgaccatcacctgcagagcttcccagggcatctctagctggctggcctggtatcagcagaagcccggcaaggcccccaagctcctgatctatgctgcttccagcctgcagagcggcgtgcccagcagattcagcggcagcggctccggcacagacttcaccctgaccatcagctccctgcagtccgaggacttcgccacctactactgccagcaggccaacagcttccccatcaccttcggcccaggcaccaaggtggagatcaagggtggtggtggttctggcggcggcggctccggtggtggtggttctcagctccagctccaggagagcgggcctggactggtgaagcccagcgagacactgagcctgacctgcaccgtgtccggcggcagcatcagcagcagcagctactacggcggctggatcagacagccacccggcaaaggactggattggatcggatccatctattatagtggaaacacctactacaaccccagcctgaagtcccgcgtgaccatctccgtggacaccagcaagaaccagttcagcctgaagctgtccagcgtgacagccgccgacaccgccgtgtactactgcgccaggcacagctgggactacttcgactactgggaccagggcaccctggtgaccgtgtcttccggaggtggtggatccgaggtgcagctggtcgagtctggaggaggattggtgcagcctggagggtcattgaaactctcatgtgcagcctctggattcaccttcaataagtacgccatgaactgggtccgccaggctccaggaaagggtttggaatgggttgctcgcataagaagtaaatataataattatgcaacatattatgccgattcagtgaaagacaggttcaccatctccagagatgattcaaaaaacactgcctatctacaaatgaacaacttgaaaactgaggacactgccgtgtactactgtgtgagacatgggaacttcggtaatagctacatatcctactgggcttactggggccaagggactctggtcaccgtctcctcaggtggtggtggttctggcggcggcggctccggtggtggtggttctcagactgttgtgactcaggaaccttcactcaccgtatcacctggtggaacagtcacactcacttgtggctcctcgactggggctgttacatctggcaactacccaaactgggtccaacaaaaaccaggtcaggcaccccgtggtctaataggtgggactaagttcctcgcccccggtactcctgccagattctcaggctccctgcttggaggcaaggctgccctcaccctctcaggggtacagccagaggatgaggcagaatattactgtgttctatggtacagcaaccgctgggtgttcggtggaggaaccaaactgactgtccta

SEQ ID NO: 893 - protein, 107 aa, Artificial Sequence
  MET-7 L
DIQMTQSPSSVSASVGDRVIITCRASQGISSWLAWYQQKPGKAPKLLIYAASSLKSGVPSRFSGSGSGTDFTVTISSLQPEDFATYYCQQSNSLPWTFGQGTKVEIK

SEQ ID NO: 894 - protein, 11 aa, Artificial Sequence
  MET-7 L-CDR1
RASQGISSWLA

SEQ ID NO: 895 - protein, 7 aa, Artificial Sequence
  MET-7 L-CDR2
AASSLKS

SEQ ID NO: 896 - protein, 9 aa, Artificial Sequence
  MET-7 L-CDR3
QQSNSLPWT

SEQ ID NO: 897 - DNA, 321 bp, Artificial Sequence
  MET-7 L
gacatccagatgacccagagccccagcagcgtgtctgccagcgtgggcgacagagtgatcatcacctgcagagcttcccagggcatctctagctggctggcctggtatcagcagaagcccggcaaggcccccaagctgctcatctatgctgcttccagcctgaagtccggcgtgcccagcagattcagcggcagcggctccggcacagacttcaccgtgaccatcagcagcctgcagcccgaggacttcgccacctactactgccagcagagcaacagcctgccctggaccttcggccagggcaccaaggtggagatcaag

SEQ ID NO: 898 - protein, 117 aa, Artificial Sequence
  MET-7 H
EVQLVESGGGLVQPGGSLRLSCAASGFTFSRYSMNWVRQAPGKGLEWVSYISSRSSTIYYADSVKGRFTMSRDNAKNSLYMQMNSLRDEDTAVYYCGYGDYDYFDYWGQGTLVTVSS

SEQ ID NO: 899 - protein, 5 aa, Artificial Sequence
  MET-7 H-CDR1
RYSMN

SEQ ID NO: 900 - protein, 17 aa, Artificial Sequence
  MET-7 H-CDR2
YISSRSSTIYYADSVKG

SEQ ID NO: 901 - protein, 8 aa, Artificial Sequence
  MET-7 H-CDR3
GDYDYFDY

SEQ ID NO: 902 - DNA, 351 bp, Artificial Sequence
  MET-7 H
gaggtgcagctggtcgagtctggcggaggactggtgcagccaggcggcagcctgagactgtcctgtgctgcttctggattcaccttcagcaggtacagcatgaactgggtccgccaggctcctggtaaaggactggagtgggtctcctacatcagcagcaggtccagcaccatctactacgccgacagcgtgaagggcaggttcaccatgagcagggacaacgccaagaacagcctgtacatgcagatgaacagcctgagggacgaggacaccgccgtgtactactgcggctacggcgactacgactacttcgactactggggccagggaaccctggtgaccgtgtcttcc

SEQ ID NO: 903 - protein, 239 aa, Artificial Sequence
  MET-7 LH
DIQMTQSPSSVSASVGDRVIITCRASQGISSWLAWYQQKPGKAPKLLIYAASSLKSGVPSRFSGSGSGTDFTVTISSLQPEDFATYYCQQSNSLPWTFGQGTKVEIKGGGGSGGGGSGGGGSEVQLVESGGGLVQPGGSLRLSCAASGFTFSRYSMNWVRQAPGKGLEWVSYISSRSSTIYYADSVKGRFTMSRDNAKNSLYMQMNSLRDEDTAVYYCGYGDYDYFDYWGQGTLVTVSS

SEQ ID NO: 904 - DNA, 717 bp, Artificial Sequence
  MET-7 LH
gacatccagatgacccagagccccagcagcgtgtctgccagcgtgggcgacagagtgatcatcacctgcagagcttcccagggcatctctagctggctggcctggtatcagcagaagcccggcaaggcccccaagctgctcatctatgctgcttccagcctgaagtccggcgtgcccagcagattcagcggcagcggctccggcacagacttcaccgtgaccatcagcagcctgcagcccgaggacttcgccacctactactgccagcagagcaacagcctgccctggaccttcggccagggcaccaaggtggagatcaagggtggtggtggttctggcggcggcggctccggtggtggtggttctgaggtgcagctggtcgagtctggcggaggactggtgcagccaggcggcagcctgagactgtcctgtgctgcttctggattcaccttcagcaggtacagcatgaactgggtccgccaggctcctggtaaaggactggagtgggtctcctacatcagcagcaggtccagcaccatctactacgccgacagcgtgaagggcaggttcaccatgagcagggacaacgccaagaacagcctgtacatgcagatgaacagcctgagggacgaggacaccgccgtgtactactgcggctacggcgactacgactacttcgactactggggccagggaaccctggtgaccgtgtcttcc

SEQ ID NO: 905 - protein, 493 aa, Artificial Sequence
  MET-7 LH x I2C HL
DIQMTQSPSSVSASVGDRVIITCRASQGISSWLAWYQQKPGKAPKLLIYAASSLKSGVPSRFSGSGSGTDFTVTISSLQPEDFATYYCQQSNSLPWTFGQGTKVEIKGGGGSGGGGSGGGGSEVQLVESGGGLVQPGGSLRLSCAASGFTFSRYSMNWVRQAPGKGLEWVSYISSRSSTIYYADSVKGRFTMSRDNAKNSLYMQMNSLRDEDTAVYYCGYGDYDYFDYWGQGTLVTVSSGGGGSEVQLVESGGGLVQPGGSLKLSCAASGFTFNKYAMNWVRQAPGKGLEWVARIRSKYNNYATYYADSVKDRFTISRDDSKNTAYLQMNNLKTEDTAVYYCVRHGNFGNSYISYWAYWGQGTLVTVSSGGGGSGGGGSGGGGSQTVVTQEPSLTVSPGGTVTLTCGSSTGAVTSGNYPNWVQQKPGQAPRGLIGGTKFLAPGTPARFSGSLLGGKAALTLSGVQPEDEAEYYCVLWYSNRWVFGGGTKLTVL

SEQ ID NO: 906 - DNA, 1479 bp, Artificial Sequence
  MET-7 LH x I2C HL
gacatccagatgacccagagccccagcagcgtgtctgccagcgtgggcgacagagtgatcatcacctgcagagcttcccagggcatctctagctggctggcctggtatcagcagaagcccggcaaggcccccaagctgctcatctatgctgcttccagcctgaagtccggcgtgcccagcagattcagcggcagcggctccggcacagacttcaccgtgaccatcagcagcctgcagcccgaggacttcgccacctactactgccagcagagcaacagcctgccctggaccttcggccagggcaccaaggtggagatcaagggtggtggtggttctggcggcggcggctccggtggtggtggttctgaggtgcagctggtcgagtctggcggaggactggtgcagccaggcggcagcctgagactgtcctgtgctgcttctggattcaccttcagcaggtacagcatgaactgggtccgccaggctcctggtaaaggactggagtgggtctcctacatcagcagcaggtccagcaccatctactacgccgacagcgtgaagggcaggttcaccatgagcagggacaacgccaagaacagcctgtacatgcagatgaacagcctgagggacgaggacaccgccgtgtactactgcggctacggcgactacgactacttcgactactggggccagggaaccctggtgaccgtgtcttccggaggtggtggatccgaggtgcagctggtcgagtctggaggaggattggtgcagcctggagggtcattgaaactctcatgtgcagcctctggattcaccttcaataagtacgccatgaactgggtccgccaggctccaggaaagggtttggaatgggttgctcgcataagaagtaaatataataattatgcaacatattatgccgattcagtgaaagacaggttcaccatctccagagatgattcaaaaaacactgcctatctacaaatgaacaacttgaaaactgaggacactgccgtgtactactgtgtgagacatgggaacttcggtaatagctacatatcctactgggcttactggggccaagggactctggtcaccgtctcctcaggtggtggtggttctggcggcggcggctccggtggtggtggttctcagactgttgtgactcaggaaccttcactcaccgtatcacctggtggaacagtcacactcacttgtggctcctcgactggggctgttacatctggcaactacccaaactgggtccaacaaaaaccaggtcaggcaccccgtggtctaataggtgggactaagttcctcgcccccggtactcctgccagattctcaggctccctgcttggaggcaaggctgccctcaccctctcaggggtacagccagaggatgaggcagaatattactgtgttctatggtacagcaaccgctgggtgttcggtggaggaaccaaactgactgtccta

SEQ ID NO: 907 - protein, 11 aa, Artificial Sequence
  ENSI L-CDR1
RASQNVGTAVA

SEQ ID NO: 908 - protein, 7 aa, Artificial Sequence
  ENSI L-CDR2
SASNRYT

SEQ ID NO: 909 - protein, 10 aa, Artificial Sequence
  ENSI L-CDR3
QQYTNYPMYT

SEQ ID NO: 910 - protein, 5 aa, Artificial Sequence
  ENSI H-CDR1
DYVIH

SEQ ID NO: 911 - protein, 17 aa, Artificial Sequence
  ENSI H-CDR2
YINPYDDDTTYNQKFKG

SEQ ID NO: 912 - protein, 15 aa, Artificial Sequence
  ENSI H-CDR3
RGNSYDGYFDYSMDY

SEQ ID NO: 913 - DNA, 2298 bp, Artificial Sequence
  Human endosialin
atgctgctgcgcctgttgctggcctgggcggccgcagggcccacactgggccaggacccctgggctgctgagccccgtgccgcctgcggccccagcagctgctacgctctcttcccacggcgccgcaccttcctggaggcctggcgggcctgccgcgagctggggggcgacctggccactcctcggacccccgaggaggcccagcgtgtggacagcctggtgggtgcgggcccagccagccggctgctgtggatcgggctgcagcggcaggcccggcaatgccagctgcagcgcccactgcgcggcttcacgtggaccacaggggaccaggacacggctttcaccaactgggcccagccagcctctggaggcccctgcccggcccagcgctgtgtggccctggaggcaagtggcgagcaccgctggctggagggctcgtgcacgctggctgtcgacggctacctgtgccagtttggcttcgagggcgcctgcccggcgctgcaagatgaggcgggccaggccggcccagccgtgtataccacgcccttccacctggtctccacagagtttgagtggctgcccttcggctctgtggccgctgtgcagtgccaggctggcaggggagcctctctgctctgcgtgaagcagcctgagggaggtgtgggctggtcacgggctgggcccctgtgcctggggactggctgcagccctgacaacgggggctgcgaacacgaatgtgtggaggaggtggatggtcacgtgtcctgccgctgcactgagggcttccggctggcagcagacgggcgcagttgcgaggacccctgtgcccaggctccgtgcgagcagcagtgtgagcccggtgggccacaaggctacagctgccactgtcgcctgggtttccggccagcggaggatgatccgcaccgctgtgtggacacagatgagtgccagattgccggtgtgtgccagcagatgtgtgtcaactacgttggtggcttcgagtgttattgtagcgagggacatgagctggaggctgatggcatcagctgcagccctgcaggggccatgggtgcccaggcttcccaggacctcggagatgagttgctggatgacggggaggatgaggaagatgaagacgaggcctggaaggccttcaacggtggctggacggagatgcctgggatcctgtggatggagcctacgcagccgcctgactttgccctggcctatagaccgagcttcccagaggacagagagccacagataccctacccggagcccacctggccacccccgctcagtgcccccagggtcccctaccactcctcagtgctctccgtcacccggcctgtggtggtctctgccacgcatcccacactgccttctgcccaccagcctcctgtgatccctgccacacacccagctttgtcccgtgaccaccagatccccgtgatcgcagccaactatccagatctgccttctgcctaccaacccggtattctctctgtctctcattcagcacagcctcctgcccaccagccccctatgatctcaaccaaatatccggagctcttccctgcccaccagtcccccatgtttccagacacccgggtcgctggcacccagaccaccactcatttgcctggaatcccacctaaccatgcccctctggtcaccaccctcggtgcccagctaccccctcaagccccagatgcccttgtcctcagaacccaggccacccagcttcccattatcccaactgcccagccctctctgaccaccacctccaggtcccctgtgtctcctgcccatcaaatctctgtgcctgctgccacccagcccgcagccctccccaccctcctgccctctcagagccccactaaccagacctcacccatcagccctacacatccccattccaaagccccccaaatcccaagggaagatggccccagtcccaagttggccctgtggctgccctcaccagctcccacagcagccccaacagccctgggggaggctggtcttgccgagcacagccagagggatgaccggtggctgctggtggcactcctggtgccaacgtgtgtctttttggtggtcctgcttgcactgggcatcgtgtactgcacccgctgtggcccccatgcacccaacaagcgcatcactgactgctatcgctgggtcatccatgctgggagcaagagcccaacagaacccatgccccccaggggcagcctcacaggggtgcagacctgcagaaccagcgtggactacaaagatgatgacgataagtga

SEQ ID NO: 914 - protein, 765 aa, Artificial Sequence
  Human endosialin
MLLRLLLAWAAAGPTLGQDPWAAEPRAACGPSSCYALFPRRRTFLEAWRACRELGGDLATPRTPEEAQRVDSLVGAGPASRLLWIGLQRQARQCQLQRPLRGFTWTTGDQDTAFTNWAQPASGGPCPAQRCVALEASGEHRWLEGSCTLAVDGYLCQFGFEGACPALQDEAGQAGPAVYTTPFHLVSTEFEWLPFGSVAAVQCQAGRGASLLCVKQPEGGVGWSRAGPLCLGTGCSPDNGGCEHECVEEVDGHVSCRCTEGFRLAADGRSCEDPCAQAPCEQQCEPGGPQGYSCHCRLGFRPAEDDPHRCVDTDECQIAGVCQQMCVNYVGGFECYCSEGHELEADGISCSPAGAMGAQASQDLGDELLDDGEDEEDEDEAWKAFNGGWTEMPGILWMEPTQPPDFALAYRPSFPEDREPQIPYPEPTWPPPLSAPRVPYHSSVLSVTRPVVVSATHPTLPSAHQPPVIPATHPALSRDHQIPVIAANYPDLPSAYQPGILSVSHSAQPPAHQPPMISTKYPELFPAHQSPMFPDTRVAGTQTTTHLPGIPPNHAPLVTTLGAQLPPQAPDALVLRTQATQLPIIPTAQPSLTTTSRSPVSPAHQISVPAATQPAALPTLLPSQSPTNQTSPISPTHPHSKAPQIPREDGPSPKLALWLPSPAPTAAPTALGEAGLAEHSQRDDRWLLVALLVPTCVFLVVLLALGIVYCTRCGPHAPNKRITDCYRWVIHAGSKSPTEPMPPRGSLTGVQTCRTSVDYKDDDDK

SEQ ID NO: 915 - DNA, 2298 bp, Artificial Sequence
  Macaque endosialin
atgctgctgcgcctgttgctggcctgggcggccgcagggcccacactgggccaggacccctgggctgctgagccccgctccgcctgcggccccagcagctgctacgctctctttccacggcgccgcacctttctggaggcctggcgggcctgccgcgagctggggggcgacctggccactcctcggacccccgaggaggcccagcgtgtggacaacctggtgggtgcaggcccggccagccggctgctgtggatcggcctgcagcggcaggcccggcaatgccagctgcagcgcccactgcgaggcttcacgtggaccacaggggaccaggacacggctttcaccaactgggcccagccagccactggaggcccctgcccggcccagcgctgtgtggccctggaggcgagtggcgagcaccgctggctggagggctcatgcacgctggctgtcgacggctacttgtgccagtttggcttcgagggtgcctgcccagcgctgcaagacgaagcgggccaggccggcccagccgtctataccacgcccttccacctggtctccacagagtttgagtggctacccttcggctctgtggccgctgtgcagtgccaggctggcaggggagcctctctgctctgcgtgaagcagcccgagggaggtgtgggctggtcacgggcagggcccctgtgcctgggggctggctgcagccctgacaacgggggctgcgaacacgaatgtgtggaggaggtggatggtcacgtgtcctgccgctgcactgagggcttccggctggcagcagacgggcgcagttgcgaggatccctgtgcccaggctccatgcgagcagcagtgtgagcccggtgggccacaaggctacagctgccactgtcgcctgggtttccgacctgcagaggatgatccgcaccgctgtgtggacacagatgagtgccagattgccggtgtgtgccagcagatgtgtgtcaactacgttggtggcttcgagtgttattgtagtgagggtcatgagctggaggctgatggcatcagctgcagccctgcaggggccatgggtgcccgggcttcccaggacctcggagatgagttgctggatgatggggaggatgaggaagatgaagacgaggcctgggaggcctttggcggtggctggacggagatgcctgggatcctgtggatggagcctactcagccgcctgactttgccctggcctatagaccgagcttcccagaggacagagagccacagataccctacccggagcccacctggccgcccccgctcagtgcccccagggtcccctaccactcctcagtgctctccgtcacccggcctgtggtggtctctgccacgcgccccacactgccttccgcccaccagcctcctgtgatccctgccacacacccagctttgtcccgtgaccaccagatccccgtgatcgcagccaactatccagatctgccttctgcctaccaacccggtattctctctgtctctcatccagcacagccccctgcccaccagccccccatgatctcaaccagatatcctgagctgttccctgcccaccagtcccccatgtttccagacacccaggtcgctggcacccagaccaccactcatttgcctgcaatcccacctaaccgtgcccctctggtcaccacactcggtgcccatcaaccccctcaagccccagatgcccctgtcctcagaacccaggctacccagcttcccattatccctactgcccagccgtctctgaccaccagctccaggtcccctgtgtctcctgcccatcaagtctctgtgcctgctgccacccagcccccagccctccccaccctcctgccctctcagagccccactaaccagacctcacccatcagccctacacatccccattccaaagtcccccaaatcccaagggaagatggccccagtcccaagctggccctgtggctgccctcagcagctcccacagcagccccaacagccctgggggaggctagtcttgccgagcacatccagagggatgaccggtggcttctggtggcactcctcgtgccaacgtgtgtctttttggtggtcctgcttgcactgggcattgtgtactgcacccgctgtggcccccatgcacccaacaagcgcatcactgactgctatcgctgggtcacccatgctgggagcaagagtccaacagaacccatgccccccaggggcagcctcacaggggtgcagacctgcagaaccagcgtggactacaaagatgatgacgataagtga

SEQ ID NO: 916 - protein, 765 aa, Artificial Sequence
  Macaque endosialin
MLLRLLLAWAAAGPTLGQDPWAAEPRSACGPSSCYALFPRRRTFLEAWRACRELGGDLATPRTPEEAQRVDNLVGAGPASRLLWIGLQRQARQCQLQRPLRGFTWTTGDQDTAFTNWAQPATGGPCPAQRCVALEASGEHRWLEGSCTLAVDGYLCQFGFEGACPALQDEAGQAGPAVYTTPFHLVSTEFEWLPFGSVAAVQCQAGRGASLLCVKQPEGGVGWSRAGPLCLGAGCSPDNGGCEHECVEEVDGHVSCRCTEGFRLAADGRSCEDPCAQAPCEQQCEPGGPQGYSCHCRLGFRPAEDDPHRCVDTDECQIAGVCQQMCVNYVGGFECYCSEGHELEADGISCSPAGAMGARASQDLGDELLDDGEDEEDEDEAWEAFGGGWTEMPGILWMEPTQPPDFALAYRPSFPEDREPQIPYPEPTWPPPLSAPRVPYHSSVLSVTRPVVVSATRPTLPSAHQPPVIPATHPALSRDHQIPVIAANYPDLPSAYQPGILSVSHPAQPPAHQPPMISTRYPELFPAHQSPMFPDTQVAGTQTTTHLPAIPPNRAPLVTTLGAHQPPQAPDAPVLRTQATQLPIIPTAQPSLTTSSRSPVSPAHQVSVPAATQPPALPTLLPSQSPTNQTSPISPTHPHSKVPQIPREDGPSPKLALWLPSAAPTAAPTALGEASLAEHIQRDDRWLLVALLVPTCVFLVVLLALGIVYCTRCGPHAPNKRITDCYRWVTHAGSKSPTEPMPPRGSLTGVQTCRTSVDYKDDDDK

SEQ ID NO: 917 - DNA, 40 bp, Artificial Sequence
  Forward primer
atatgaattcgccaccatgctgctgcgcctgttgctggcc

SEQ ID NO: 918 - DNA, 24 bp, Artificial Sequence
  Reverse primer
gtcttcatcttcctcatcctcccc

SEQ ID NO: 919 - DNA, 26 bp, Artificial Sequence
  Forward primer
gtcaactacgttggtggcttcgagtg

SEQ ID NO: 920 - DNA, 57 bp, Artificial Sequence
  Reverse primer
ggtctagatcacttatcgtcatcatctttgtagtccacgctggttctgcaggtctgc

SEQ ID NO: 921 - DNA, 84 bp, Artificial Sequence
  Primer 5'ED-VH-A-XhoI
ccagctctcgagtcaggasctgagstgrwgaagcctggggcttcagtgaagrtgtcctgcaaggcttctggatacacattcact

SEQ ID NO: 922 - DNA, 81 bp, Artificial Sequence
  Primer 3'ED-VH-B
aatatatccmatccactcaaggckctktccakktsyctgcytcayccagtgtataacatagtcagtgaatgtgtatccaga

SEQ ID NO: 923 - DNA, 66 bp, Artificial Sequence
  Primer 5'ED-VH-C
cttgagtggatkggatatattaatccttatgatgatgatactacctacaaccagaagttcaagggc

SEQ ID NO: 924 - DNA, 70 bp, Artificial Sequence
  Primer 3'ED-VH-D
tgagctscatgtaggctgtgytggmggatktgwctmsagtmawtgtgrccyggcccttgaacttctggtt

SEQ ID NO: 925 - DNA, 70 bp, Artificial Sequence
  Primer 5'ED-VH-E
cacagcctacatgsaactcarcagcctgasatctgaggacactgcagtctattactgtgcaagaaggggg

SEQ ID NO: 926 - DNA, 87 bp, Artificial Sequence
  Primer 3'ED-VH-F-BstEII
cctgatggtgaccaaggttccttgaccccagtagtccatagaatagtcgaagtaaccatcataggagttcccccttcttgcacagta

SEQ ID NO: 927 - DNA, 83 bp, Artificial Sequence
  Primer 5'ED-VL-A-SacI
  misc_feature (64)..(65): n is a, c, g, or t
ccagtcgagctccagctgacccagtctcmaarmttcmtgtccrcatcagtaggagacagagtcnnsatcacctgcagggccag

SEQ ID NO: 928 - DNA, 63 bp, Artificial Sequence
  Primer 3'ED-VL-B
tcctggtttctgttgataccaggctacagcagtacccacattctgactggccctgcaggtgat

SEQ ID NO: 929 - DNA, 72 bp, Artificial Sequence
  Primer 5'ED-VL-C
tatcaacagaaaccaggamaakcccctaaattactgatttactcggcatcgaatcggtacactggagtccct

SEQ ID NO: 930 - DNA, 69 bp, Artificial Sequence
  Primer 3'ED-VL-D
gctgatggtgagagtgaamtctgtcccagatccactgcctgagaagcgayyagggactccagtgtaccg

SEQ ID NO: 931 - DNA, 69 bp, Artificial Sequence
  Primer 5'ED-VL-E
ttcactctcaccatcagcartmtgcagyctgaagacytsgcarmttattwctgccagcaatataccaac

SEQ ID NO: 932 - DNA, 81 bp, Artificial Sequence
  Primer 3'ED-VL-F-BsiWI/SpeI
cctgatactagtcgtacgttttatttccagcttggtcccctgtccaaacgtatacatgggatagttggtatattgctggca

SEQ ID NO: 933 - DNA, 8 bp, Artificial Sequence
  Flag-tag
dykddddk

SEQ ID NO: 934 - protein, 113 aa, Artificial Sequence
  Ep 5-10  VL
ELVMTQSPSSLTVTAGEKVTMSCKSSQSLLNSGNQKNYLTWYQQKPGQPPKLLIYWASTRESGVPDRFTGSGSGTDFTLTISSVQAEDLAVYYCQNDYSYPLTFGAGTKLEIK

SEQ ID NO: 935 - protein, 17 aa, Artificial Sequence
  Ep 5-10 LCDR1
KSSQSLLNSGNQKNYLT

SEQ ID NO: 936 - protein, 7 aa, Artificial Sequence
  Ep 5-10 LCDR2
WASTRES

SEQ ID NO: 937 - protein, 9 aa, Artificial Sequence
  Ep 5-10 LCDR3
QNDYSYPLT

SEQ ID NO: 938 - DNA, 339 bp, Artificial Sequence
  Ep 5-10  VL
gagctcgtgatgacacagtctccatcctccctgactgtgacagcaggagagaaggtcactatgagctgcaagtccagtcagagtctgttaaacagtggaaatcaaaagaactacttgacctggtaccagcagaaaccagggcagcctcctaaactgttgatctactgggcatccactagggaatctggggtccctgatcgcttcacaggcagtggatctggaacagatttcactctcaccatcagcagtgtgcaggctgaagacctggcagtttattactgtcagaatgattatagttatccgctcacgttcggtgctgggaccaagcttgagatcaaa

SEQ ID NO: 939 - protein, 120 aa, Artificial Sequence
  Ep 5-10  HL
EVQLLEQSGAELVRPGTSVKISCKASGYAFTNYWLGWVKQRPGHGLEWIGDIFPGSGNIHYNEKFKGKATLTADKSSSTAYMQLSSLTFEDSAVYFCARLRNWDEPMDYWGQGTTVTVSS

SEQ ID NO: 940 - protein, 5 aa, Artificial Sequence
  Ep 5-10 HCDR1
NYWLG

SEQ ID NO: 941 - protein, 17 aa, Artificial Sequence
  Ep 5-10 HCDR2
DIFPGSGNIHYNEKFKG

SEQ ID NO: 942 - protein, 10 aa, Artificial Sequence
  Ep 5-10 HCDR3
LRNWDEPMDY

SEQ ID NO: 943 - DNA, 360 bp, Artificial Sequence
  Ep 5-10  HL
gaggtgcagctgctcgagcagtctggagctgagctggtaaggcctgggacttcagtgaagatatcctgcaaggcttctggatacgccttcactaactactggctaggttgggtaaagcagaggcctggacatggacttgagtggattggagatattttccctggaagtggtaatatccactacaatgagaagttcaagggcaaagccacactgactgcagacaaatcttcgagcacagcctatatgcagctcagtagcctgacatttgaggactctgctgtctatttctgtgcaagactgaggaactgggacgagcctatggactactggggccaagggaccacggtcaccgtctcctcc

SEQ ID NO: 944 - protein, 502 aa, Artificial Sequence
  Ep 5-10  LH x I2C HL
ELVMTQSPSSLTVTAGEKVTMSCKSSQSLLNSGNQKNYLTWYQQKPGQPPKLLIYWASTRESGVPDRFTGSGSGTDFTLTISSVQAEDLAVYYCQNDYSYPLTFGAGTKLEIKGGGGSGGGGSGGGGSEVQLLEQSGAELVRPGTSVKISCKASGYAFTNYWLGWVKQRPGHGLEWIGDIFPGSGNIHYNEKFKGKATLTADKSSSTAYMQLSSLTFEDSAVYFCARLRNWDEPMDYWGQGTTVTVSSGGGGSEVQLVESGGGLVQPGGSLKLSCAASGFTFNKYAMNWVRQAPGKGLEWVARIRSKYNNYATYYADSVKDRFTISRDDSKNTAYLQMNNLKTEDTAVYYCVRHGNFGNSYISYWAYWGQGTLVTVSSGGGGSGGGGSGGGGSQTVVTQEPSLTVSPGGTVTLTCGSSTGAVTSGNYPNWVQQKPGQAPRGLIGGTKFLAPGTPARFSGSLLGGKAALTLSGVQPEDEAEYYCVLWYSNRWVFGGGTKLTVL

SEQ ID NO: 945 - DNA, 1506 bp, Artificial Sequence
  Ep 5-10  LH x I2C HL
gagctcgtgatgacacagtctccatcctccctgactgtgacagcaggagagaaggtcactatgagctgcaagtccagtcagagtctgttaaacagtggaaatcaaaagaactacttgacctggtaccagcagaaaccagggcagcctcctaaactgttgatctactgggcatccactagggaatctggggtccctgatcgcttcacaggcagtggatctggaacagatttcactctcaccatcagcagtgtgcaggctgaagacctggcagtttattactgtcagaatgattatagttatccgctcacgttcggtgctgggaccaagcttgagatcaaaggtggtggtggttctggcggcggcggctccggtggtggtggttctgaggtgcagctgctcgagcagtctggagctgagctggtaaggcctgggacttcagtgaagatatcctgcaaggcttctggatacgccttcactaactactggctaggttgggtaaagcagaggcctggacatggacttgagtggattggagatattttccctggaagtggtaatatccactacaatgagaagttcaagggcaaagccacactgactgcagacaaatcttcgagcacagcctatatgcagctcagtagcctgacatttgaggactctgctgtctatttctgtgcaagactgaggaactgggacgagcctatggactactggggccaagggaccacggtcaccgtctcctccggaggtggtggatccgaggtgcagctggtcgagtctggaggaggattggtgcagcctggagggtcattgaaactctcatgtgcagcctctggattcaccttcaataagtacgccatgaactgggtccgccaggctccaggaaagggtttggaatgggttgctcgcataagaagtaaatataataattatgcaacatattatgccgattcagtgaaagacaggttcaccatctccagagatgattcaaaaaacactgcctatctacaaatgaacaacttgaaaactgaggacactgccgtgtactactgtgtgagacatgggaacttcggtaatagctacatatcctactgggcttactggggccaagggactctggtcaccgtctcctcaggtggtggtggttctggcggcggcggctccggtggtggtggttctcagactgttgtgactcaggaaccttcactcaccgtatcacctggtggaacagtcacactcacttgtggctcctcgactggggctgttacatctggcaactacccaaactgggtccaacaaaaaccaggtcaggcaccccgtggtctaataggtgggactaagttcctcgcccccggtactcctgccagattctcaggctccctgcttggaggcaaggctgccctcaccctctcaggggtacagccagaggatgaggcagaatattactgtgttctatggtacagcaaccgctgggtgttcggtggaggaaccaaactgactgtccta

SEQ ID NO: 946 - protein, 502 aa, Artificial Sequence
  Ep 5-10  LH x H2C HL
ELVMTQSPSSLTVTAGEKVTMSCKSSQSLLNSGNQKNYLTWYQQKPGQPPKLLIYWASTRESGVPDRFTGSGSGTDFTLTISSVQAEDLAVYYCQNDYSYPLTFGAGTKLEIKGGGGSGGGGSGGGGSEVQLLEQSGAELVRPGTSVKISCKASGYAFTNYWLGWVKQRPGHGLEWIGDIFPGSGNIHYNEKFKGKATLTADKSSSTAYMQLSSLTFEDSAVYFCARLRNWDEPMDYWGQGTTVTVSSGGGGSEVQLVESGGGLVQPGGSLKLSCAASGFTFNKYAMNWVRQAPGKGLEWVARIRSKYNNYATYYADSVKDRFTISRDDSKNTAYLQMNNLKTEDTAVYYCVRHGNFGNSYISYWAYWGQGTLVTVSSGGGGSGGGGSGGGGSQTVVTQEPSLTVSPGGTVTLTCGSSTGAVTSGYYPNWVQQKPGQAPRGLIGGTKFLAPGTPARFSGSLLGGKAALTLSGVQPEDEAEYYCALWYSNRWVFGGGTKLTVL

SEQ ID NO: 947 - DNA, 1506 bp, Artificial Sequence
  Ep 5-10  LH x H2C HL
gagctcgtgatgacacagtctccatcctccctgactgtgacagcaggagagaaggtcactatgagctgcaagtccagtcagagtctgttaaacagtggaaatcaaaagaactacttgacctggtaccagcagaaaccagggcagcctcctaaactgttgatctactgggcatccactagggaatctggggtccctgatcgcttcacaggcagtggatctggaacagatttcactctcaccatcagcagtgtgcaggctgaagacctggcagtttattactgtcagaatgattatagttatccgctcacgttcggtgctgggaccaagcttgagatcaaaggtggtggtggttctggcggcggcggctccggtggtggtggttctgaggtgcagctgctcgagcagtctggagctgagctggtaaggcctgggacttcagtgaagatatcctgcaaggcttctggatacgccttcactaactactggctaggttgggtaaagcagaggcctggacatggacttgagtggattggagatattttccctggaagtggtaatatccactacaatgagaagttcaagggcaaagccacactgactgcagacaaatcttcgagcacagcctatatgcagctcagtagcctgacatttgaggactctgctgtctatttctgtgcaagactgaggaactgggacgagcctatggactactggggccaagggaccacggtcaccgtctcctccggaggtggtggatccgaggtgcagctggtcgagtctggaggaggattggtgcagcctggagggtcattgaaactctcatgtgcagcctctggattcaccttcaataagtacgccatgaactgggtccgccaggctccaggaaagggtttggaatgggttgctcgcataagaagtaaatataataattatgcaacatattatgccgattcagtgaaagacaggttcaccatctccagagatgattcaaaaaacactgcctatctacaaatgaacaacttgaaaactgaggacactgccgtgtactactgtgtgagacatgggaacttcggtaatagctacatatcctactgggcttactggggccaagggactctggtcaccgtctcctcaggtggtggtggttctggcggcggcggctccggtggtggtggttctcagactgttgtgactcaggaaccttcactcaccgtatcacctggtggaacagtcacactcacttgtggctcctcgactggggctgttacatctggctactacccaaactgggtccaacaaaaaccaggtcaggcaccccgtggtctaataggtgggactaagttcctcgcccccggtactcctgccagattctcaggctccctgcttggaggcaaggctgccctcaccctctcaggggtacagccagaggatgaggcagaatattactgtgctctatggtacagcaaccgctgggtgttcggtggaggaaccaaactgactgtccta

SEQ ID NO: 948 - protein, 502 aa, Artificial Sequence
  Ep 5-10  LH x F12Q HL
ELVMTQSPSSLTVTAGEKVTMSCKSSQSLLNSGNQKNYLTWYQQKPGQPPKLLIYWASTRESGVPDRFTGSGSGTDFTLTISSVQAEDLAVYYCQNDYSYPLTFGAGTKLEIKGGGGSGGGGSGGGGSEVQLLEQSGAELVRPGTSVKISCKASGYAFTNYWLGWVKQRPGHGLEWIGDIFPGSGNIHYNEKFKGKATLTADKSSSTAYMQLSSLTFEDSAVYFCARLRNWDEPMDYWGQGTTVTVSSGGGGSEVQLVESGGGLVQPGGSLKLSCAASGFTFNSYAMNWVRQAPGKGLEWVARIRSKYNNYATYYADSVKGRFTISRDDSKNTAYLQMNNLKTEDTAVYYCVRHGNFGNSYVSWWAYWGQGTLVTVSSGGGGSGGGGSGGGGSQTVVTQEPSLTVSPGGTVTLTCGSSTGAVTSGNYPNWVQQKPGQAPRGLIGGTKFLAPGTPARFSGSLLGGKAALTLSGVQPEDEAEYYCVLWYSNRWVFGGGTKLTVL

SEQ ID NO: 949 - DNA, 1506 bp, Artificial Sequence
  Ep 5-10  LH x F12Q HL
gagctcgtgatgacacagtctccatcctccctgactgtgacagcaggagagaaggtcactatgagctgcaagtccagtcagagtctgttaaacagtggaaatcaaaagaactacttgacctggtaccagcagaaaccagggcagcctcctaaactgttgatctactgggcatccactagggaatctggggtccctgatcgcttcacaggcagtggatctggaacagatttcactctcaccatcagcagtgtgcaggctgaagacctggcagtttattactgtcagaatgattatagttatccgctcacgttcggtgctgggaccaagcttgagatcaaaggtggtggtggttctggcggcggcggctccggtggtggtggttctgaggtgcagctgctcgagcagtctggagctgagctggtaaggcctgggacttcagtgaagatatcctgcaaggcttctggatacgccttcactaactactggctaggttgggtaaagcagaggcctggacatggacttgagtggattggagatattttccctggaagtggtaatatccactacaatgagaagttcaagggcaaagccacactgactgcagacaaatcttcgagcacagcctatatgcagctcagtagcctgacatttgaggactctgctgtctatttctgtgcaagactgaggaactgggacgagcctatggactactggggccaagggaccacggtcaccgtctcctccggaggtggtggatccgaggtgcagctggtcgagtctggaggaggattggtgcagcctggagggtcattgaaactctcatgtgcagcctctggattcaccttcaatagctacgccatgaactgggtccgccaggctccaggaaagggtttggaatgggttgctcgcataagaagtaaatataataattatgcaacatattatgccgattcagtgaaaggcaggttcaccatctccagagatgattcaaaaaacactgcctatctacaaatgaacaacttgaaaactgaggacactgccgtgtactactgtgtgagacatgggaacttcggtaatagctacgtttcctggtgggcttactggggccaagggactctggtcaccgtctcctcaggtggtggtggttctggcggcggcggctccggtggtggtggttctcagactgttgtgactcaggaaccttcactcaccgtatcacctggtggaacagtcacactcacttgtggctcctcgactggggctgttacatctggcaactacccaaactgggtccaacaaaaaccaggtcaggcaccccgtggtctaataggtgggactaagttcctcgcccccggtactcctgccagattctcaggctccctgcttggaggcaaggctgccctcaccctctcaggggtacagccagaggatgaggcagaatattactgtgttctatggtacagcaaccgctgggtgttcggtggaggaaccaaactgactgtccta

SEQ ID NO: 950 - protein, 113 aa, Artificial Sequence
  hEp 14-A1 L
DIVMTQTPLSLPVTPGEPVSISCKSSQSLLNSGNQKNYLTWYLQKPGQSPQLLIYWASTRESGVPDRFSGSGSGTDFTLTISSVQAEDVGVYYCQNDYSYPLTFGQGTKLEIK

SEQ ID NO: 951 - protein, 17 aa, Artificial Sequence
  hEp 14-A1 LCDR1
KSSQSLLNSGNQKNYLT

SEQ ID NO: 952 - protein, 7 aa, Artificial Sequence
  hEp 14-A1 LCDR2
WASTRES

SEQ ID NO: 953 - protein, 9 aa, Artificial Sequence
  hEp 14-A1 LCDR3
QNDYSYPLT

SEQ ID NO: 954 - DNA, 339 bp, Artificial Sequence
  hEp 14-A1 L
gacatcgtgatgacacagactccactctccctgcctgtgacaccaggagagccggtctctatcagctgcaagtccagtcagagtctgttaaacagtggaaatcaaaagaactacttgacctggtacctgcagaaaccagggcagtctcctcaactgttgatctactgggcatccactagggaatctggggtccctgatcgcttctcaggcagtggatctggaacagatttcactctcacaatcagcagtgtgcaggctgaagacgtgggagtttattactgtcagaatgattatagttatccgctcacgttcggtcaagggaccaagcttgagatcaaa

SEQ ID NO: 955 - protein, 119 aa, Artificial Sequence
  hEp 14-A1 H
QVQLVQSGAEVKKPGSSVKISCKASGYTFSNYWLGWVRQAPGQGLEWIGDIFPGSGNIHYNEKFKGRVTITADKSTSTAYMELSSLTSEDTAVYYCARLRNWDEPMDYWGQGTTVTVSS

SEQ ID NO: 956 - protein, 5 aa, Artificial Sequence
  hEp 14-A1 HCDR1
NYWLG

SEQ ID NO: 957 - protein, 17 aa, Artificial Sequence
  hEp 14-A1 HCDR2
DIFPGSGNIHYNEKFKG

SEQ ID NO: 958 - protein, 10 aa, Artificial Sequence
  hEp 14-A1 HCDR3
LRNWDEPMDY

SEQ ID NO: 959 - DNA, 357 bp, Artificial Sequence
  hEp 14-A1 H
caggtgcagctggtccagtctggagctgaggtgaaaaagcctgggtcttcagtgaagatatcctgcaaggcttctggatacaccttctctaactactggctaggttgggtaaggcaggcgcctggacagggacttgagtggattggagatattttccctggaagtggtaatatccactacaatgagaagttcaagggcagagtcacaatcactgcagacaaatctacgagcacagcctatatggaactcagtagcctgacatctgaggacactgctgtctattactgtgcaagactgaggaactgggacgagcctatggactactggggccaagggaccacggtcaccgtctcctcc

SEQ ID NO: 960 - protein, 501 aa, Artificial Sequence
  hEp 14-A1 LH x I2C HL
DIVMTQTPLSLPVTPGEPVSISCKSSQSLLNSGNQKNYLTWYLQKPGQSPQLLIYWASTRESGVPDRFSGSGSGTDFTLTISSVQAEDVGVYYCQNDYSYPLTFGQGTKLEIKGGGGSGGGGSGGGGSQVQLVQSGAEVKKPGSSVKISCKASGYTFSNYWLGWVRQAPGQGLEWIGDIFPGSGNIHYNEKFKGRVTITADKSTSTAYMELSSLTSEDTAVYYCARLRNWDEPMDYWGQGTTVTVSSGGGGSEVQLVESGGGLVQPGGSLKLSCAASGFTFNKYAMNWVRQAPGKGLEWVARIRSKYNNYATYYADSVKDRFTISRDDSKNTAYLQMNNLKTEDTAVYYCVRHGNFGNSYISYWAYWGQGTLVTVSSGGGGSGGGGSGGGGSQTVVTQEPSLTVSPGGTVTLTCGSSTGAVTSGNYPNWVQQKPGQAPRGLIGGTKFLAPGTPARFSGSLLGGKAALTLSGVQPEDEAEYYCVLWYSNRWVFGGGTKLTVL

SEQ ID NO: 961 - DNA, 1503 bp, Artificial Sequence
  hEp 14-A1 LH x I2C HL
gacatcgtgatgacacagactccactctccctgcctgtgacaccaggagagccggtctctatcagctgcaagtccagtcagagtctgttaaacagtggaaatcaaaagaactacttgacctggtacctgcagaaaccagggcagtctcctcaactgttgatctactgggcatccactagggaatctggggtccctgatcgcttctcaggcagtggatctggaacagatttcactctcacaatcagcagtgtgcaggctgaagacgtgggagtttattactgtcagaatgattatagttatccgctcacgttcggtcaagggaccaagcttgagatcaaaggtggtggtggttctggcggcggcggctccggtggtggtggttctcaggtgcagctggtccagtctggagctgaggtgaaaaagcctgggtcttcagtgaagatatcctgcaaggcttctggatacaccttctctaactactggctaggttgggtaaggcaggcgcctggacagggacttgagtggattggagatattttccctggaagtggtaatatccactacaatgagaagttcaagggcagagtcacaatcactgcagacaaatctacgagcacagcctatatggaactcagtagcctgacatctgaggacactgctgtctattactgtgcaagactgaggaactgggacgagcctatggactactggggccaagggaccacggtcaccgtctcctccggaggtggtggatccgaggtgcagctggtcgagtctggaggaggattggtgcagcctggagggtcattgaaactctcatgtgcagcctctggattcaccttcaataagtacgccatgaactgggtccgccaggctccaggaaagggtttggaatgggttgctcgcataagaagtaaatataataattatgcaacatattatgccgattcagtgaaagacaggttcaccatctccagagatgattcaaaaaacactgcctatctacaaatgaacaacttgaaaactgaggacactgccgtgtactactgtgtgagacatgggaacttcggtaatagctacatatcctactgggcttactggggccaagggactctggtcaccgtctcctcaggtggtggtggttctggcggcggcggctccggtggtggtggttctcagactgttgtgactcaggaaccttcactcaccgtatcacctggtggaacagtcacactcacttgtggctcctcgactggggctgttacatctggcaactacccaaactgggtccaacaaaaaccaggtcaggcaccccgtggtctaataggtgggactaagttcctcgcccccggtactcctgccagattctcaggctccctgcttggaggcaaggctgccctcaccctctcaggggtacagccagaggatgaggcagaatattactgtgttctatggtacagcaaccgctgggtgttcggtggaggaaccaaactgactgtccta

SEQ ID NO: 962 - protein, 113 aa, Artificial Sequence
  hEp 14-D2 L
DIVMTQTPLSLPVTPGEQVSISCKSSQSLLNSGNQKNYLTWYQQKPGQSPQLLIYWASTRESGVPDRFSGSGSGTDFTLKISRVEAEDVGVYYCQNDYSYPLTFGQGTKLEIK

SEQ ID NO: 963 - protein, 17 aa, Artificial Sequence
  hEp 14-D2 LCDR1
KSSQSLLNSGNQKNYLT

SEQ ID NO: 964 - protein, 7 aa, Artificial Sequence
  hEp 14-D2 LCDR2
WASTRES

SEQ ID NO: 965 - protein, 9 aa, Artificial Sequence
  hEp 14-D2 LCDR3
QNDYSYPLT

SEQ ID NO: 966 - DNA, 339 bp, Artificial Sequence
  hEp 14-D2 L
gacatcgtgatgacacagactccactctccctgcctgtgacaccaggagagcaggtctctatcagctgcaagtccagtcagagtctgttaaacagtggaaatcaaaagaactacttgacctggtaccagcagaaaccagggcagtctcctcaactgttgatctactgggcatccactagggaatctggggtccctgatcgcttctcaggcagtggatctggaacagatttcactctcaaaatcagccgtgtggaggctgaagacgtgggagtttattactgtcagaatgattatagttatccgctcacgttcggtcaagggaccaagcttgagatcaaa

SEQ ID NO: 967 - protein, 119 aa, Artificial Sequence
  hEp 14-D2 H
QVQLVQSGAEVKKPGSSVKVSCKASGYTFSNYWLGWVRQAPGQGLEWMGDIFPGSGNIHYNEKFKGRVTITADKSTSTAYMELSSLTSEDTAVYYCARLRNWDEPMDYWGQGTTVTVSS

SEQ ID NO: 968 - protein, 5 aa, Artificial Sequence
  hEp 14-D2 HCDR1
NYWLG

SEQ ID NO: 969 - protein, 17 aa, Artificial Sequence
  hEp 14-D2 HCDR2
DIFPGSGNIHYNEKFKG

SEQ ID NO: 970 - protein, 10 aa, Artificial Sequence
  hEp 14-D2 HCDR3
LRNWDEPMDY

SEQ ID NO: 971 - DNA, 357 bp, Artificial Sequence
  hEp 14-D2 H
caggtgcagctggtccagtctggagctgaggtgaaaaagcctgggtcttcagtgaaggtatcctgcaaggcttctggatacaccttctctaactactggctaggttgggtaaggcaggcgcctggacagggacttgagtggatgggagatattttccctggaagtggtaatatccactacaatgagaagttcaagggcagagtcacaatcactgcagacaaatctacgagcacagcctatatggaactcagtagcctgacatctgaggacactgctgtctattactgtgcaagactgaggaactgggacgagcctatggactactggggccaagggaccacggtcaccgtctcctcc

SEQ ID NO: 972 - protein, 501 aa, Artificial Sequence
  hEp 14-D2 LH x I2C HL
DIVMTQTPLSLPVTPGEQVSISCKSSQSLLNSGNQKNYLTWYQQKPGQSPQLLIYWASTRESGVPDRFSGSGSGTDFTLKISRVEAEDVGVYYCQNDYSYPLTFGQGTKLEIKGGGGSGGGGSGGGGSQVQLVQSGAEVKKPGSSVKVSCKASGYTFSNYWLGWVRQAPGQGLEWMGDIFPGSGNIHYNEKFKGRVTITADKSTSTAYMELSSLTSEDTAVYYCARLRNWDEPMDYWGQGTTVTVSSGGGGSEVQLVESGGGLVQPGGSLKLSCAASGFTFNKYAMNWVRQAPGKGLEWVARIRSKYNNYATYYADSVKDRFTISRDDSKNTAYLQMNNLKTEDTAVYYCVRHGNFGNSYISYWAYWGQGTLVTVSSGGGGSGGGGSGGGGSQTVVTQEPSLTVSPGGTVTLTCGSSTGAVTSGNYPNWVQQKPGQAPRGLIGGTKFLAPGTPARFSGSLLGGKAALTLSGVQPEDEAEYYCVLWYSNRWVFGGGTKLTVL

SEQ ID NO: 973 - DNA, 1503 bp, Artificial Sequence
  hEp 14-D2 LH x I2C HL
gacatcgtgatgacacagactccactctccctgcctgtgacaccaggagagcaggtctctatcagctgcaagtccagtcagagtctgttaaacagtggaaatcaaaagaactacttgacctggtaccagcagaaaccagggcagtctcctcaactgttgatctactgggcatccactagggaatctggggtccctgatcgcttctcaggcagtggatctggaacagatttcactctcaaaatcagccgtgtggaggctgaagacgtgggagtttattactgtcagaatgattatagttatccgctcacgttcggtcaagggaccaagcttgagatcaaaggtggtggtggttctggcggcggcggctccggtggtggtggttctcaggtgcagctggtccagtctggagctgaggtgaaaaagcctgggtcttcagtgaaggtatcctgcaaggcttctggatacaccttctctaactactggctaggttgggtaaggcaggcgcctggacagggacttgagtggatgggagatattttccctggaagtggtaatatccactacaatgagaagttcaagggcagagtcacaatcactgcagacaaatctacgagcacagcctatatggaactcagtagcctgacatctgaggacactgctgtctattactgtgcaagactgaggaactgggacgagcctatggactactggggccaagggaccacggtcaccgtctcctccggaggtggtggatccgaggtgcagctggtcgagtctggaggaggattggtgcagcctggagggtcattgaaactctcatgtgcagcctctggattcaccttcaataagtacgccatgaactgggtccgccaggctccaggaaagggtttggaatgggttgctcgcataagaagtaaatataataattatgcaacatattatgccgattcagtgaaagacaggttcaccatctccagagatgattcaaaaaacactgcctatctacaaatgaacaacttgaaaactgaggacactgccgtgtactactgtgtgagacatgggaacttcggtaatagctacatatcctactgggcttactggggccaagggactctggtcaccgtctcctcaggtggtggtggttctggcggcggcggctccggtggtggtggttctcagactgttgtgactcaggaaccttcactcaccgtatcacctggtggaacagtcacactcacttgtggctcctcgactggggctgttacatctggcaactacccaaactgggtccaacaaaaaccaggtcaggcaccccgtggtctaataggtgggactaagttcctcgcccccggtactcctgccagattctcaggctccctgcttggaggcaaggctgccctcaccctctcaggggtacagccagaggatgaggcagaatattactgtgttctatggtacagcaaccgctgggtgttcggtggaggaaccaaactgactgtccta

SEQ ID NO: 974 - protein, 113 aa, Artificial Sequence
  hEp 14-H8 L
DIVMTQTPLSLPVTPGEPASISCKSSQSLLNSGNQKNYLTWYQQKPGQSPKLLIYWASTRESGVPDRFSGSGSGTDFTLKISRVEAEDVGVYYCQNDYSYPLTFGQGTKLEIK

SEQ ID NO: 975 - protein, 17 aa, Artificial Sequence
  hEp 14-H8 LCDR1
KSSQSLLNSGNQKNYLT

SEQ ID NO: 976 - protein, 7 aa, Artificial Sequence
  hEp 14-H8 LCDR2
WASTRES

SEQ ID NO: 977 - protein, 9 aa, Artificial Sequence
  hEp 14-H8 LCDR3
QNDYSYPLT

SEQ ID NO: 978 - DNA, 339 bp, Artificial Sequence
  hEp 14-H8 L
gacatcgtgatgacacagactccactctccctgcctgtgacaccaggagagccggcctctatcagctgcaagtccagtcagagtctgttaaacagtggaaatcaaaagaactacttgacctggtaccagcagaaaccagggcagtctcctaaactgttgatctactgggcatccactagggaatctggggtccctgatcgcttctcaggcagtggatctggaacagatttcactctcaaaatcagccgtgtggaggctgaagacgtgggagtttattactgtcagaatgattatagttatccgctcacgttcggtcaagggaccaagcttgagatcaaa

SEQ ID NO: 979 - protein, 119 aa, Artificial Sequence
  hEp 14-H8 H
QVQLVQSGAELKKPGSSVKVSCKASGYTFSNYWLGWVRQTPGQGLEWMGDIFPGSGNIHYNEKFKGRVTITADKSTSTAYMELSSLRSEDTAVYYCARLRNWDEPMDYWGQGTTVTVSS

SEQ ID NO: 980 - protein, 5 aa, Artificial Sequence
  hEp 14-H8 HCDR1
NYWLG

SEQ ID NO: 981 - protein, 17 aa, Artificial Sequence
  hEp 14-H8 HCDR2
DIFPGSGNIHYNEKFKG

SEQ ID NO: 982 - protein, 10 aa, Artificial Sequence
  hEp 14-H8 HCDR3
LRNWDEPMDY

SEQ ID NO: 983 - DNA, 357 bp, Artificial Sequence
  hEp 14-H8 H
caggtgcagctggtccagtctggagctgagctgaaaaagcctgggtcttcagtgaaggtatcctgcaaggcttctggatacaccttctctaactactggctaggttgggtaaggcagacgcctggacagggacttgagtggatgggagatattttccctggaagtggtaatatccactacaatgagaagttcaagggcagagtcacaatcactgcagacaaatctacgagcacagcctatatggaactcagtagcctgagatctgaggacactgctgtctattactgtgcaagactgaggaactgggacgagcctatggactactggggccaagggaccacggtcaccgtctcctcc

SEQ ID NO: 984 - protein, 501 aa, Artificial Sequence
  hEp 14-H8 LH x I2C HL
DIVMTQTPLSLPVTPGEPASISCKSSQSLLNSGNQKNYLTWYQQKPGQSPKLLIYWASTRESGVPDRFSGSGSGTDFTLKISRVEAEDVGVYYCQNDYSYPLTFGQGTKLEIKGGGGSGGGGSGGGGSQVQLVQSGAELKKPGSSVKVSCKASGYTFSNYWLGWVRQTPGQGLEWMGDIFPGSGNIHYNEKFKGRVTITADKSTSTAYMELSSLRSEDTAVYYCARLRNWDEPMDYWGQGTTVTVSSGGGGSEVQLVESGGGLVQPGGSLKLSCAASGFTFNKYAMNWVRQAPGKGLEWVARIRSKYNNYATYYADSVKDRFTISRDDSKNTAYLQMNNLKTEDTAVYYCVRHGNFGNSYISYWAYWGQGTLVTVSSGGGGSGGGGSGGGGSQTVVTQEPSLTVSPGGTVTLTCGSSTGAVTSGNYPNWVQQKPGQAPRGLIGGTKFLAPGTPARFSGSLLGGKAALTLSGVQPEDEAEYYCVLWYSNRWVFGGGTKLTVL

SEQ ID NO: 985 - DNA, 1503 bp, Artificial Sequence
  hEp 14-H8 LH x I2C HL
gacatcgtgatgacacagactccactctccctgcctgtgacaccaggagagccggcctctatcagctgcaagtccagtcagagtctgttaaacagtggaaatcaaaagaactacttgacctggtaccagcagaaaccagggcagtctcctaaactgttgatctactgggcatccactagggaatctggggtccctgatcgcttctcaggcagtggatctggaacagatttcactctcaaaatcagccgtgtggaggctgaagacgtgggagtttattactgtcagaatgattatagttatccgctcacgttcggtcaagggaccaagcttgagatcaaaggtggtggtggttctggcggcggcggctccggtggtggtggttctcaggtgcagctggtccagtctggagctgagctgaaaaagcctgggtcttcagtgaaggtatcctgcaaggcttctggatacaccttctctaactactggctaggttgggtaaggcagacgcctggacagggacttgagtggatgggagatattttccctggaagtggtaatatccactacaatgagaagttcaagggcagagtcacaatcactgcagacaaatctacgagcacagcctatatggaactcagtagcctgagatctgaggacactgctgtctattactgtgcaagactgaggaactgggacgagcctatggactactggggccaagggaccacggtcaccgtctcctccggaggtggtggatccgaggtgcagctggtcgagtctggaggaggattggtgcagcctggagggtcattgaaactctcatgtgcagcctctggattcaccttcaataagtacgccatgaactgggtccgccaggctccaggaaagggtttggaatgggttgctcgcataagaagtaaatataataattatgcaacatattatgccgattcagtgaaagacaggttcaccatctccagagatgattcaaaaaacactgcctatctacaaatgaacaacttgaaaactgaggacactgccgtgtactactgtgtgagacatgggaacttcggtaatagctacatatcctactgggcttactggggccaagggactctggtcaccgtctcctcaggtggtggtggttctggcggcggcggctccggtggtggtggttctcagactgttgtgactcaggaaccttcactcaccgtatcacctggtggaacagtcacactcacttgtggctcctcgactggggctgttacatctggcaactacccaaactgggtccaacaaaaaccaggtcaggcaccccgtggtctaataggtgggactaagttcctcgcccccggtactcctgccagattctcaggctccctgcttggaggcaaggctgccctcaccctctcaggggtacagccagaggatgaggcagaatattactgtgttctatggtacagcaaccgctgggtgttcggtggaggaaccaaactgactgtccta

SEQ ID NO: 986 - protein, 113 aa, Artificial Sequence
  hEp 14-A6 L
DIVMTQTPFSLTVTPGETVSISCKSSQSLLNSGNQKNYLTWYLQKPGQSPQLLIYWASTRESGVPDRFSGSGSGTDFTLTISSVEAEDVGVYYCQNDYSYPLTFGQGTKLEIK

SEQ ID NO: 987 - protein, 17 aa, Artificial Sequence
  hEp 14-A6 LCDR1
KSSQSLLNSGNQKNYLT

SEQ ID NO: 988 - protein, 7 aa, Artificial Sequence
  hEp 14-A6 LCDR2
WASTRES

SEQ ID NO: 989 - protein, 9 aa, Artificial Sequence
  hEp 14-A6 LCDR3
QNDYSYPLT

SEQ ID NO: 990 - DNA, 339 bp, Artificial Sequence
  hEp 14-A6 L
gacatcgtgatgacacagactccattctccctgactgtgacaccaggagagacggtctctatcagctgcaagtccagtcagagtctgttaaacagtggaaatcaaaagaactacttgacctggtacctgcagaaaccagggcagtctcctcaactgttgatctactgggcatccactagggaatctggggtccctgatcgcttctcaggcagtggatctggaacagatttcactctcacaatcagcagtgtggaggctgaagacgtgggagtttattactgtcagaatgattatagttatccgctcacgttcggtcaagggaccaagcttgagatcaaa

SEQ ID NO: 991 - protein, 119 aa, Artificial Sequence
  hEp 14-A6 H
QVQLVQSGAELVKPGSSVKVSCKASGYTFSNYWLGWVRQAPGQGLEWIGDIFPGSGNIHYNEKFKGKVTITADKSTSTAYMELSSLRFEDTAVYYCARLRNWDEPMDYWGQGTTVTVSS

SEQ ID NO: 992 - protein, 5 aa, Artificial Sequence
  hEp 14-A6 HCDR1
NYWLG

SEQ ID NO: 993 - protein, 17 aa, Artificial Sequence
  hEp 14-A6 HCDR2
DIFPGSGNIHYNEKFKG

SEQ ID NO: 994 - protein, 10 aa, Artificial Sequence
  hEp 14-A6 HCDR3
LRNWDEPMDY

SEQ ID NO: 995 - DNA, 357 bp, Artificial Sequence
  hEp 14-A6 H
caggtgcagctggtccagtctggagctgagctggtaaagcctgggtcttcagtgaaggtatcctgcaaggcttctggatacaccttctctaactactggctaggttgggtaaggcaggcgcctggacagggacttgagtggattggagatattttccctggaagtggtaatatccactacaatgagaagttcaagggcaaagtcacaatcactgcagacaaatctacgagcacagcctatatggaactcagtagcctgagatttgaggacactgctgtctattactgtgcaagactgaggaactgggacgagcctatggactactggggccaagggaccacggtcaccgtctcctcc

SEQ ID NO: 996 - protein, 501 aa, Artificial Sequence
  hEp 14-A6 LH x I2C HL
DIVMTQTPFSLTVTPGETVSISCKSSQSLLNSGNQKNYLTWYLQKPGQSPQLLIYWASTRESGVPDRFSGSGSGTDFTLTISSVEAEDVGVYYCQNDYSYPLTFGQGTKLEIKGGGGSGGGGSGGGGSQVQLVQSGAELVKPGSSVKVSCKASGYTFSNYWLGWVRQAPGQGLEWIGDIFPGSGNIHYNEKFKGKVTITADKSTSTAYMELSSLRFEDTAVYYCARLRNWDEPMDYWGQGTTVTVSSGGGGSEVQLVESGGGLVQPGGSLKLSCAASGFTFNKYAMNWVRQAPGKGLEWVARIRSKYNNYATYYADSVKDRFTISRDDSKNTAYLQMNNLKTEDTAVYYCVRHGNFGNSYISYWAYWGQGTLVTVSSGGGGSGGGGSGGGGSQTVVTQEPSLTVSPGGTVTLTCGSSTGAVTSGNYPNWVQQKPGQAPRGLIGGTKFLAPGTPARFSGSLLGGKAALTLSGVQPEDEAEYYCVLWYSNRWVFGGGTKLTVL

SEQ ID NO: 997 - DNA, 1503 bp, Artificial Sequence
  hEp 14-A6 LH x I2C HL
gacatcgtgatgacacagactccattctccctgactgtgacaccaggagagacggtctctatcagctgcaagtccagtcagagtctgttaaacagtggaaatcaaaagaactacttgacctggtacctgcagaaaccagggcagtctcctcaactgttgatctactgggcatccactagggaatctggggtccctgatcgcttctcaggcagtggatctggaacagatttcactctcacaatcagcagtgtggaggctgaagacgtgggagtttattactgtcagaatgattatagttatccgctcacgttcggtcaagggaccaagcttgagatcaaaggtggtggtggttctggcggcggcggctccggtggtggtggttctcaggtgcagctggtccagtctggagctgagctggtaaagcctgggtcttcagtgaaggtatcctgcaaggcttctggatacaccttctctaactactggctaggttgggtaaggcaggcgcctggacagggacttgagtggattggagatattttccctggaagtggtaatatccactacaatgagaagttcaagggcaaagtcacaatcactgcagacaaatctacgagcacagcctatatggaactcagtagcctgagatttgaggacactgctgtctattactgtgcaagactgaggaactgggacgagcctatggactactggggccaagggaccacggtcaccgtctcctccggaggtggtggatccgaggtgcagctggtcgagtctggaggaggattggtgcagcctggagggtcattgaaactctcatgtgcagcctctggattcaccttcaataagtacgccatgaactgggtccgccaggctccaggaaagggtttggaatgggttgctcgcataagaagtaaatataataattatgcaacatattatgccgattcagtgaaagacaggttcaccatctccagagatgattcaaaaaacactgcctatctacaaatgaacaacttgaaaactgaggacactgccgtgtactactgtgtgagacatgggaacttcggtaatagctacatatcctactgggcttactggggccaagggactctggtcaccgtctcctcaggtggtggtggttctggcggcggcggctccggtggtggtggttctcagactgttgtgactcaggaaccttcactcaccgtatcacctggtggaacagtcacactcacttgtggctcctcgactggggctgttacatctggcaactacccaaactgggtccaacaaaaaccaggtcaggcaccccgtggtctaataggtgggactaagttcctcgcccccggtactcctgccagattctcaggctccctgcttggaggcaaggctgccctcaccctctcaggggtacagccagaggatgaggcagaatattactgtgttctatggtacagcaaccgctgggtgttcggtggaggaaccaaactgactgtccta

SEQ ID NO: 998 - protein, 113 aa, Artificial Sequence
  hEp 14-D1 L
DIVMTQTPFSLTVTPGEPASISCKSSQSLLNSGNQKNYLTWYQQKPGQPPQLLIYWASTRESGVPDRFSGSGSGTDFTLKISRVEAEDVAVYYCQNDYSYPLTFGQGTKLEIK

SEQ ID NO: 999 - protein, 17 aa, Artificial Sequence
  hEp 14-D1 LCDR1
KSSQSLLNSGNQKNYLT

SEQ ID NO: 1000 - protein, 7 aa, Artificial Sequence
  hEp 14-D1 LCDR2
WASTRES

SEQ ID NO: 1001 - protein, 9 aa, Artificial Sequence
  hEp 14-D1 LCDR3
QNDYSYPLT

SEQ ID NO: 1002 - DNA, 339 bp, Artificial Sequence
  hEp 14-D1 L
gacatcgtgatgacacagactccattctccctgactgtgacaccaggagagccggcctctatcagctgcaagtccagtcagagtctgttaaacagtggaaatcaaaagaactacttgacctggtaccagcagaaaccagggcagcctcctcaactgttgatctactgggcatccactagggaatctggggtccctgatcgcttctcaggcagtggatctggaacagatttcactctcaaaatcagccgtgtggaggctgaagacgtggcagtttattactgtcagaatgattatagttatccgctcacgttcggtcaagggaccaagcttgagatcaaa

SEQ ID NO: 1003 - protein, 119 aa, Artificial Sequence
  hEp 14-D1 H
QVQLVQSGAELKKPGSSVKISCKASGYTFSNYWLGWVRQAPGQGLEWMGDIFPGSGNIHYNEKFKGRVTLTADKSTSTAYMELSSLTSEDTAVYYCARLRNWDEPMDYWGQGTTVTVSS

SEQ ID NO: 1004 - protein, 5 aa, Artificial Sequence
  hEp 14-D1 HCDR1
NYWLG

SEQ ID NO: 1005 - protein, 17 aa, Artificial Sequence
  hEp 14-D1 HCDR2
DIFPGSGNIHYNEKFKG

SEQ ID NO: 1006 - protein, 10 aa, Artificial Sequence
  hEp 14-D1 HCDR3
LRNWDEPMDY

SEQ ID NO: 1007 - DNA, 357 bp, Artificial Sequence
  hEp 14-D1 H
caggtgcagctggtccagtctggagctgagctgaaaaagcctgggtcttcagtgaagatatcctgcaaggcttctggatacaccttctctaactactggctaggttgggtaaggcaggcgcctggacagggacttgagtggatgggagatattttccctggaagtggtaatatccactacaatgagaagttcaagggcagagtcacactcactgcagacaaatctacgagcacagcctatatggaactcagtagcctgacatctgaggacactgctgtctattactgtgcaagactgaggaactgggacgagcctatggactactggggccaagggaccacggtcaccgtctcctcc

SEQ ID NO: 1008 - protein, 501 aa, Artificial Sequence
  hEp 14-D1 LH x I2C HL
DIVMTQTPFSLTVTPGEPASISCKSSQSLLNSGNQKNYLTWYQQKPGQPPQLLIYWASTRESGVPDRFSGSGSGTDFTLKISRVEAEDVAVYYCQNDYSYPLTFGQGTKLEIKGGGGSGGGGSGGGGSQVQLVQSGAELKKPGSSVKISCKASGYTFSNYWLGWVRQAPGQGLEWMGDIFPGSGNIHYNEKFKGRVTLTADKSTSTAYMELSSLTSEDTAVYYCARLRNWDEPMDYWGQGTTVTVSSGGGGSEVQLVESGGGLVQPGGSLKLSCAASGFTFNKYAMNWVRQAPGKGLEWVARIRSKYNNYATYYADSVKDRFTISRDDSKNTAYLQMNNLKTEDTAVYYCVRHGNFGNSYISYWAYWGQGTLVTVSSGGGGSGGGGSGGGGSQTVVTQEPSLTVSPGGTVTLTCGSSTGAVTSGNYPNWVQQKPGQAPRGLIGGTKFLAPGTPARFSGSLLGGKAALTLSGVQPEDEAEYYCVLWYSNRWVFGGGTKLTVL

SEQ ID NO: 1009 - DNA, 1503 bp, Artificial Sequence
  hEp 14-D1 LH x I2C HL
gacatcgtgatgacacagactccattctccctgactgtgacaccaggagagccggcctctatcagctgcaagtccagtcagagtctgttaaacagtggaaatcaaaagaactacttgacctggtaccagcagaaaccagggcagcctcctcaactgttgatctactgggcatccactagggaatctggggtccctgatcgcttctcaggcagtggatctggaacagatttcactctcaaaatcagccgtgtggaggctgaagacgtggcagtttattactgtcagaatgattatagttatccgctcacgttcggtcaagggaccaagcttgagatcaaaggtggtggtggttctggcggcggcggctccggtggtggtggttctcaggtgcagctggtccagtctggagctgagctgaaaaagcctgggtcttcagtgaagatatcctgcaaggcttctggatacaccttctctaactactggctaggttgggtaaggcaggcgcctggacagggacttgagtggatgggagatattttccctggaagtggtaatatccactacaatgagaagttcaagggcagagtcacactcactgcagacaaatctacgagcacagcctatatggaactcagtagcctgacatctgaggacactgctgtctattactgtgcaagactgaggaactgggacgagcctatggactactggggccaagggaccacggtcaccgtctcctccggaggtggtggatccgaggtgcagctggtcgagtctggaggaggattggtgcagcctggagggtcattgaaactctcatgtgcagcctctggattcaccttcaataagtacgccatgaactgggtccgccaggctccaggaaagggtttggaatgggttgctcgcataagaagtaaatataataattatgcaacatattatgccgattcagtgaaagacaggttcaccatctccagagatgattcaaaaaacactgcctatctacaaatgaacaacttgaaaactgaggacactgccgtgtactactgtgtgagacatgggaacttcggtaatagctacatatcctactgggcttactggggccaagggactctggtcaccgtctcctcaggtggtggtggttctggcggcggcggctccggtggtggtggttctcagactgttgtgactcaggaaccttcactcaccgtatcacctggtggaacagtcacactcacttgtggctcctcgactggggctgttacatctggcaactacccaaactgggtccaacaaaaaccaggtcaggcaccccgtggtctaataggtgggactaagttcctcgcccccggtactcctgccagattctcaggctccctgcttggaggcaaggctgccctcaccctctcaggggtacagccagaggatgaggcagaatattactgtgttctatggtacagcaaccgctgggtgttcggtggaggaaccaaactgactgtccta

SEQ ID NO: 1010 - protein, 113 aa, Artificial Sequence
  hEp 14-G6 L
DIVMTQTPLSLTVTPGEPVSISCKSSQSLLNSGNQKNYLTWYLQKPGQPPQLLIYWASTRESGVPDRFSGSGSGTDFTLKISRVQAEDVGVYYCQNDYSYPLTFGQGTKLEIK

SEQ ID NO: 1011 - protein, 17 aa, Artificial Sequence
  hEp 14-G6 LCDR1
KSSQSLLNSGNQKNYLT

SEQ ID NO: 1012 - protein, 7 aa, Artificial Sequence
  hEp 14-G6 LCDR2
WASTRES

SEQ ID NO: 1013 - protein, 9 aa, Artificial Sequence
  hEp 14-G6 LCDR3
QNDYSYPLT

SEQ ID NO: 1014 - DNA, 339 bp, Artificial Sequence
  hEp 14-G6 L
gacatcgtgatgacacagactccactctccctgactgtgacaccaggagagccggtctctatcagctgcaagtccagtcagagtctgttaaacagtggaaatcaaaagaactacttgacctggtacctgcagaaaccagggcagcctcctcaactgttgatctactgggcatccactagggaatctggggtccctgatcgcttctcaggcagtggatctggaacagatttcactctcaaaatcagccgtgtgcaggctgaagacgtgggagtttattactgtcagaatgattatagttatccgctcacgttcggtcaagggaccaagcttgagatcaaa

SEQ ID NO: 1015 - protein, 119 aa, Artificial Sequence
  hEp 14-G6 H
QVQLVQSGAEVKKPGSSVKVSCKASGYTFSNYWLGWVRQAPGQGLEWMGDIFPGSGNIHYNEKFKGRATITADKSTSTAYMELSSLTSEDTAVYYCARLRNWDEPMDYWGQGTTVTVSS

SEQ ID NO: 1016 - protein, 5 aa, Artificial Sequence
  hEp 14-G6 HCDR1
NYWLG

SEQ ID NO: 1017 - protein, 17 aa, Artificial Sequence
  hEp 14-G6 HCDR2
DIFPGSGNIHYNEKFKG

SEQ ID NO: 1018 - protein, 10 aa, Artificial Sequence
  hEp 14-G6 HCDR3
LRNWDEPMDY

SEQ ID NO: 1019 - DNA, 357 bp, Artificial Sequence
  hEp 14-G6 H
caggtgcagctggtccagtctggagctgaggtgaaaaagcctgggtcttcagtgaaggtatcctgcaaggcttctggatacaccttctctaactactggctaggttgggtaaggcaggcgcctggacagggacttgagtggatgggagatattttccctggaagtggtaatatccactacaatgagaagttcaagggcagagccacaatcactgcagacaaatctacgagcacagcctatatggaactcagtagcctgacatctgaggacactgctgtctattactgtgcaagactgaggaactgggacgagcctatggactactggggccaagggaccacggtcaccgtctcctcc

SEQ ID NO: 1020 - protein, 501 aa, Artificial Sequence
  hEp 14-G6 LH x I2C HL
DIVMTQTPLSLTVTPGEPVSISCKSSQSLLNSGNQKNYLTWYLQKPGQPPQLLIYWASTRESGVPDRFSGSGSGTDFTLKISRVQAEDVGVYYCQNDYSYPLTFGQGTKLEIKGGGGSGGGGSGGGGSQVQLVQSGAEVKKPGSSVKVSCKASGYTFSNYWLGWVRQAPGQGLEWMGDIFPGSGNIHYNEKFKGRATITADKSTSTAYMELSSLTSEDTAVYYCARLRNWDEPMDYWGQGTTVTVSSGGGGSEVQLVESGGGLVQPGGSLKLSCAASGFTFNKYAMNWVRQAPGKGLEWVARIRSKYNNYATYYADSVKDRFTISRDDSKNTAYLQMNNLKTEDTAVYYCVRHGNFGNSYISYWAYWGQGTLVTVSSGGGGSGGGGSGGGGSQTVVTQEPSLTVSPGGTVTLTCGSSTGAVTSGNYPNWVQQKPGQAPRGLIGGTKFLAPGTPARFSGSLLGGKAALTLSGVQPEDEAEYYCVLWYSNRWVFGGGTKLTVL

SEQ ID NO: 1021 - DNA, 1503 bp, Artificial Sequence
  hEp 14-G6 LH x I2C HL
gacatcgtgatgacacagactccactctccctgactgtgacaccaggagagccggtctctatcagctgcaagtccagtcagagtctgttaaacagtggaaatcaaaagaactacttgacctggtacctgcagaaaccagggcagcctcctcaactgttgatctactgggcatccactagggaatctggggtccctgatcgcttctcaggcagtggatctggaacagatttcactctcaaaatcagccgtgtgcaggctgaagacgtgggagtttattactgtcagaatgattatagttatccgctcacgttcggtcaagggaccaagcttgagatcaaaggtggtggtggttctggcggcggcggctccggtggtggtggttctcaggtgcagctggtccagtctggagctgaggtgaaaaagcctgggtcttcagtgaaggtatcctgcaaggcttctggatacaccttctctaactactggctaggttgggtaaggcaggcgcctggacagggacttgagtggatgggagatattttccctggaagtggtaatatccactacaatgagaagttcaagggcagagccacaatcactgcagacaaatctacgagcacagcctatatggaactcagtagcctgacatctgaggacactgctgtctattactgtgcaagactgaggaactgggacgagcctatggactactggggccaagggaccacggtcaccgtctcctccggaggtggtggatccgaggtgcagctggtcgagtctggaggaggattggtgcagcctggagggtcattgaaactctcatgtgcagcctctggattcaccttcaataagtacgccatgaactgggtccgccaggctccaggaaagggtttggaatgggttgctcgcataagaagtaaatataataattatgcaacatattatgccgattcagtgaaagacaggttcaccatctccagagatgattcaaaaaacactgcctatctacaaatgaacaacttgaaaactgaggacactgccgtgtactactgtgtgagacatgggaacttcggtaatagctacatatcctactgggcttactggggccaagggactctggtcaccgtctcctcaggtggtggtggttctggcggcggcggctccggtggtggtggttctcagactgttgtgactcaggaaccttcactcaccgtatcacctggtggaacagtcacactcacttgtggctcctcgactggggctgttacatctggcaactacccaaactgggtccaacaaaaaccaggtcaggcaccccgtggtctaataggtgggactaagttcctcgcccccggtactcctgccagattctcaggctccctgcttggaggcaaggctgccctcaccctctcaggggtacagccagaggatgaggcagaatattactgtgttctatggtacagcaaccgctgggtgttcggtggaggaaccaaactgactgtccta

SEQ ID NO: 1022 - protein, 113 aa, Artificial Sequence
  hEp 14-H4 L
DIVMTQTPLSLPVTPGETASISCKSSQSLLNSGNQKNYLTWYQQKPGQSPQLLIYWASTRESGVPDRFSGSGSGTDFTLKISSVEAEDVGVYYCQNDYSYPLTFGQGTKLEIK

SEQ ID NO: 1023 - protein, 17 aa, Artificial Sequence
  hEp 14-H4 LCDR1
KSSQSLLNSGNQKNYLT

SEQ ID NO: 1024 - protein, 7 aa, Artificial Sequence
  hEp 14-H4 LCDR2
WASTRES

SEQ ID NO: 1025 - protein, 9 aa, Artificial Sequence
  hEp 14-H4 LCDR3
QNDYSYPLT

SEQ ID NO: 1026 - DNA, 339 bp, Artificial Sequence
  hEp 14-H4 L
gacatcgtgatgacacagactccactctccctgcctgtgacaccaggagagacggcctctatcagctgcaagtccagtcagagtctgttaaacagtggaaatcaaaagaactacttgacctggtaccagcagaaaccagggcagtctcctcaactgttgatctactgggcatccactagggaatctggggtccctgatcgcttctcaggcagtggatctggaacagatttcactctcaaaatcagcagtgtggaggctgaagacgtgggagtttattactgtcagaatgattatagttatccgctcacgttcggtcaagggaccaagcttgagatcaaa

SEQ ID NO: 1027 - protein, 119 aa, Artificial Sequence
  hEp 14-H4 H
QVQLVQSGAEVVKPGSSVKVSCKASGYTFSNYWLGWVRQAPGQGLEWMGDIFPGSGNIHYNEKFKGRVTITADKSTSTAYMELSSLTSEDTAVYYCARLRNWDEPMDYWGQGTTVTVSS

SEQ ID NO: 1028 - protein, 5 aa, Artificial Sequence
  hEp 14-H4 HCDR1
NYWLG

SEQ ID NO: 1029 - protein, 17 aa, Artificial Sequence
  hEp 14-H4 HCDR2
DIFPGSGNIHYNEKFKG

SEQ ID NO: 1030 - protein, 10 aa, Artificial Sequence
  hEp 14-H4 HCDR3
LRNWDEPMDY

SEQ ID NO: 1031 - DNA, 357 bp, Artificial Sequence
  hEp 14-H4 H
caggtgcagctggtccagtctggagctgaggtggtaaagcctgggtcttcagtgaaggtatcctgcaaggcttctggatacaccttctctaactactggctaggttgggtaaggcaggcgcctggacagggacttgagtggatgggagatattttccctggaagtggtaatatccactacaatgagaagttcaagggcagagtcacaatcactgcagacaaatctacgagcacagcctatatggaactcagtagcctgacatctgaggacactgctgtctattactgtgcaagactgaggaactgggacgagcctatggactactggggccaagggaccacggtcaccgtctcctcc

SEQ ID NO: 1032 - protein, 501 aa, Artificial Sequence
  hEp 14-H4 LH x I2C HL
DIVMTQTPLSLPVTPGETASISCKSSQSLLNSGNQKNYLTWYQQKPGQSPQLLIYWASTRESGVPDRFSGSGSGTDFTLKISSVEAEDVGVYYCQNDYSYPLTFGQGTKLEIKGGGGSGGGGSGGGGSQVQLVQSGAEVVKPGSSVKVSCKASGYTFSNYWLGWVRQAPGQGLEWMGDIFPGSGNIHYNEKFKGRVTITADKSTSTAYMELSSLTSEDTAVYYCARLRNWDEPMDYWGQGTTVTVSSGGGGSEVQLVESGGGLVQPGGSLKLSCAASGFTFNKYAMNWVRQAPGKGLEWVARIRSKYNNYATYYADSVKDRFTISRDDSKNTAYLQMNNLKTEDTAVYYCVRHGNFGNSYISYWAYWGQGTLVTVSSGGGGSGGGGSGGGGSQTVVTQEPSLTVSPGGTVTLTCGSSTGAVTSGNYPNWVQQKPGQAPRGLIGGTKFLAPGTPARFSGSLLGGKAALTLSGVQPEDEAEYYCVLWYSNRWVFGGGTKLTVL

SEQ ID NO: 1033 - DNA, 1503 bp, Artificial Sequence
  hEp 14-H4 LH x I2C HL
gacatcgtgatgacacagactccactctccctgcctgtgacaccaggagagacggcctctatcagctgcaagtccagtcagagtctgttaaacagtggaaatcaaaagaactacttgacctggtaccagcagaaaccagggcagtctcctcaactgttgatctactgggcatccactagggaatctggggtccctgatcgcttctcaggcagtggatctggaacagatttcactctcaaaatcagcagtgtggaggctgaagacgtgggagtttattactgtcagaatgattatagttatccgctcacgttcggtcaagggaccaagcttgagatcaaaggtggtggtggttctggcggcggcggctccggtggtggtggttctcaggtgcagctggtccagtctggagctgaggtggtaaagcctgggtcttcagtgaaggtatcctgcaaggcttctggatacaccttctctaactactggctaggttgggtaaggcaggcgcctggacagggacttgagtggatgggagatattttccctggaagtggtaatatccactacaatgagaagttcaagggcagagtcacaatcactgcagacaaatctacgagcacagcctatatggaactcagtagcctgacatctgaggacactgctgtctattactgtgcaagactgaggaactgggacgagcctatggactactggggccaagggaccacggtcaccgtctcctccggaggtggtggatccgaggtgcagctggtcgagtctggaggaggattggtgcagcctggagggtcattgaaactctcatgtgcagcctctggattcaccttcaataagtacgccatgaactgggtccgccaggctccaggaaagggtttggaatgggttgctcgcataagaagtaaatataataattatgcaacatattatgccgattcagtgaaagacaggttcaccatctccagagatgattcaaaaaacactgcctatctacaaatgaacaacttgaaaactgaggacactgccgtgtactactgtgtgagacatgggaacttcggtaatagctacatatcctactgggcttactggggccaagggactctggtcaccgtctcctcaggtggtggtggttctggcggcggcggctccggtggtggtggttctcagactgttgtgactcaggaaccttcactcaccgtatcacctggtggaacagtcacactcacttgtggctcctcgactggggctgttacatctggcaactacccaaactgggtccaacaaaaaccaggtcaggcaccccgtggtctaataggtgggactaagttcctcgcccccggtactcctgccagattctcaggctccctgcttggaggcaaggctgccctcaccctctcaggggtacagccagaggatgaggcagaatattactgtgttctatggtacagcaaccgctgggtgttcggtggaggaaccaaactgactgtccta

SEQ ID NO: 1034 - protein, 113 aa, Artificial Sequence
  hEp 17-A6 L
DIVMTQTPLSLTVTPGEPVSISCKSSQSLLNSGNQKNYLTWYLQKPGQPPQLLIYWASTRESGVPDRFSGSGSGTDFTLKISRVEAEDVGVYYCQNDYSYPLTFGQGTKLEIK

SEQ ID NO: 1035 - protein, 17 aa, Artificial Sequence
  hEp 17-A6 LCDR1
KSSQSLLNSGNQKNYLT

SEQ ID NO: 1036 - protein, 7 aa, Artificial Sequence
  hEp 17-A6 LCDR2
WASTRES

SEQ ID NO: 1037 - protein, 9 aa, Artificial Sequence
  hEp 17-A6 LCDR3
QNDYSYPLT

SEQ ID NO: 1038 - DNA, 339 bp, Artificial Sequence
  hEp 17-A6 L
gacatcgtgatgacacagactccactctccctgactgtgacaccaggagagccggtctctatcagctgcaagtccagtcagagtctgttaaacagtggaaatcaaaagaactacttgacctggtacctgcagaaaccagggcagcctcctcaactgttgatctactgggcatccactagggaatctggggtccctgatcgcttctcaggcagtggatctggaacagatttcactctcaaaatcagccgtgtggaggctgaagacgtgggagtttattactgtcagaatgattatagttatccgctcacgttcggtcaagggaccaagcttgagatcaaa

SEQ ID NO: 1039 - protein, 119 aa, Artificial Sequence
  hEp 17-A6 H
QVQLVQSGAEVKRPGSSVKISCKASGYTFSNYWLGWVKQAPGQGLEWMGDIFPGSGNIHYNEKFKGRVTITADKSTSTAYMELSSLTSEDTAVYFCARLRNWDEPMDYWGQGTTVTVSS

SEQ ID NO: 1040 - protein, 5 aa, Artificial Sequence
  hEp 17-A6 HCDR1
NYWLG

SEQ ID NO: 1041 - protein, 17 aa, Artificial Sequence
  hEp 17-A6 HCDR2
DIFPGSGNIHYNEKFKG

SEQ ID NO: 1042 - protein, 10 aa, Artificial Sequence
  hEp 17-A6 HCDR3
LRNWDEPMDY

SEQ ID NO: 1043 - DNA, 357 bp, Artificial Sequence
  hEp 17-A6 H
caggtgcagctggtccagtctggagctgaggtgaaaaggcctgggtcttcagtgaagatatcctgcaaggcttctggatacaccttctctaactactggctaggttgggtaaagcaggcgcctggacagggacttgagtggatgggagatattttccccggaagtggtaatatccactacaatgagaagttcaagggcagagtcacaatcactgcagacaaatctacgagcacagcctatatggaactcagtagcctgacatctgaggacactgctgtctatttctgtgcaagactgaggaactgggacgagcctatggactactggggccaagggaccacggtcaccgtctcctcc

SEQ ID NO: 1044 - protein, 501 aa, Artificial Sequence
  hEp 17-A6 LH x I2C HL
DIVMTQTPLSLTVTPGEPVSISCKSSQSLLNSGNQKNYLTWYLQKPGQPPQLLIYWASTRESGVPDRFSGSGSGTDFTLKISRVEAEDVGVYYCQNDYSYPLTFGQGTKLEIKGGGGSGGGGSGGGGSQVQLVQSGAEVKRPGSSVKISCKASGYTFSNYWLGWVKQAPGQGLEWMGDIFPGSGNIHYNEKFKGRVTITADKSTSTAYMELSSLTSEDTAVYFCARLRNWDEPMDYWGQGTTVTVSSGGGGSEVQLVESGGGLVQPGGSLKLSCAASGFTFNKYAMNWVRQAPGKGLEWVARIRSKYNNYATYYADSVKDRFTISRDDSKNTAYLQMNNLKTEDTAVYYCVRHGNFGNSYISYWAYWGQGTLVTVSSGGGGSGGGGSGGGGSQTVVTQEPSLTVSPGGTVTLTCGSSTGAVTSGNYPNWVQQKPGQAPRGLIGGTKFLAPGTPARFSGSLLGGKAALTLSGVQPEDEAEYYCVLWYSNRWVFGGGTKLTVL

SEQ ID NO: 1045 - DNA, 1503 bp, Artificial Sequence
  hEp 17-A6 LH x I2C HL
gacatcgtgatgacacagactccactctccctgactgtgacaccaggagagccggtctctatcagctgcaagtccagtcagagtctgttaaacagtggaaatcaaaagaactacttgacctggtacctgcagaaaccagggcagcctcctcaactgttgatctactgggcatccactagggaatctggggtccctgatcgcttctcaggcagtggatctggaacagatttcactctcaaaatcagccgtgtggaggctgaagacgtgggagtttattactgtcagaatgattatagttatccgctcacgttcggtcaagggaccaagcttgagatcaaaggtggtggtggttctggcggcggcggctccggtggtggtggttctcaggtgcagctggtccagtctggagctgaggtgaaaaggcctgggtcttcagtgaagatatcctgcaaggcttctggatacaccttctctaactactggctaggttgggtaaagcaggcgcctggacagggacttgagtggatgggagatattttccccggaagtggtaatatccactacaatgagaagttcaagggcagagtcacaatcactgcagacaaatctacgagcacagcctatatggaactcagtagcctgacatctgaggacactgctgtctatttctgtgcaagactgaggaactgggacgagcctatggactactggggccaagggaccacggtcaccgtctcctccggaggtggtggatccgaggtgcagctggtcgagtctggaggaggattggtgcagcctggagggtcattgaaactctcatgtgcagcctctggattcaccttcaataagtacgccatgaactgggtccgccaggctccaggaaagggtttggaatgggttgctcgcataagaagtaaatataataattatgcaacatattatgccgattcagtgaaagacaggttcaccatctccagagatgattcaaaaaacactgcctatctacaaatgaacaacttgaaaactgaggacactgccgtgtactactgtgtgagacatgggaacttcggtaatagctacatatcctactgggcttactggggccaagggactctggtcaccgtctcctcaggtggtggtggttctggcggcggcggctccggtggtggtggttctcagactgttgtgactcaggaaccttcactcaccgtatcacctggtggaacagtcacactcacttgtggctcctcgactggggctgttacatctggcaactacccaaactgggtccaacaaaaaccaggtcaggcaccccgtggtctaataggtgggactaagttcctcgcccccggtactcctgccagattctcaggctccctgcttggaggcaaggctgccctcaccctctcaggggtacagccagaggatgaggcagaatattactgtgttctatggtacagcaaccgctgggtgttcggtggaggaaccaaactgactgtccta

SEQ ID NO: 1046 - protein, 113 aa, Artificial Sequence
  hEp 17-E9 L
DIVMTQTPLSLTVTPGEPVSISCKSSQSLLNSGNQKNYLTWYLQKPGQPPKLLIYWASTRESGVPDRFSGSGSGTDFTLNISRVEAEDVGVYYCQNDYSYPLTFGQGTKLEIK

SEQ ID NO: 1047 - protein, 17 aa, Artificial Sequence
  hEp 17-E9 LCDR1
KSSQSLLNSGNQKNYLT

SEQ ID NO: 1048 - protein, 7 aa, Artificial Sequence
  hEp 17-E9 LCDR2
WASTRES

SEQ ID NO: 1049 - protein, 9 aa, Artificial Sequence
  hEp 17-E9 LCDR3
QNDYSYPLT

SEQ ID NO: 1050 - DNA, 339 bp, Artificial Sequence
  hEp 17-E9 L
gacatcgtgatgacacagactccactctccctgactgtgacaccaggagagccggtctctatcagctgcaagtccagtcagagtctgttaaacagtggaaatcaaaagaactacttgacctggtacctgcagaaaccagggcagcctcctaaactgttgatctactgggcatccactagggaatctggggtccctgatcgcttctcaggcagtggatctggaacagatttcactctcaacatcagccgtgtggaggctgaagacgtgggagtttattactgtcagaatgattatagttatccgctcacgttcggtcaagggaccaagcttgagatcaaa

SEQ ID NO: 1051 - protein, 119 aa, Artificial Sequence
  hEp 17-E9 H
QVQLVQSGAEVKKPGSSVKVSCKASGYTFSNYWLGWVKQAPGHGLEWMGDIFPGSGNIHYNEKFKGRVTITADKSTSTAYMELSSLRSEDTAVYYCARLRNWDEPMDYWGQGTTVTVSS

SEQ ID NO: 1052 - protein, 5 aa, Artificial Sequence
  hEp 17-E9 HCDR1
NYWLG

SEQ ID NO: 1053 - protein, 17 aa, Artificial Sequence
  hEp 17-E9 HCDR2
DIFPGSGNIHYNEKFKG

SEQ ID NO: 1054 - protein, 10 aa, Artificial Sequence
  hEp 17-E9 HCDR3
LRNWDEPMDY

SEQ ID NO: 1055 - DNA, 357 bp, Artificial Sequence
  hEp 17-E9 H
caggtgcagctggtccagtctggagctgaggtgaaaaagcctgggtcttcagtgaaggtatcctgcaaggcttctggatacaccttctctaactactggctaggttgggtaaagcaggcgcctggacatggacttgagtggatgggagatattttccctggaagtggtaatatccactacaatgagaagttcaagggcagagtcacaatcactgcagacaaatctacgagcacagcctatatggaactcagtagcctgagatctgaggacactgctgtctattactgtgcaagactgaggaactgggacgagcctatggactactggggccaagggaccacggtcaccgtctcctcc

SEQ ID NO: 1056 - protein, 501 aa, Artificial Sequence
  hEp 17-E9 LH x I2C HL
DIVMTQTPLSLTVTPGEPVSISCKSSQSLLNSGNQKNYLTWYLQKPGQPPKLLIYWASTRESGVPDRFSGSGSGTDFTLNISRVEAEDVGVYYCQNDYSYPLTFGQGTKLEIKGGGGSGGGGSGGGGSQVQLVQSGAEVKKPGSSVKVSCKASGYTFSNYWLGWVKQAPGHGLEWMGDIFPGSGNIHYNEKFKGRVTITADKSTSTAYMELSSLRSEDTAVYYCARLRNWDEPMDYWGQGTTVTVSSGGGGSEVQLVESGGGLVQPGGSLKLSCAASGFTFNKYAMNWVRQAPGKGLEWVARIRSKYNNYATYYADSVKDRFTISRDDSKNTAYLQMNNLKTEDTAVYYCVRHGNFGNSYISYWAYWGQGTLVTVSSGGGGSGGGGSGGGGSQTVVTQEPSLTVSPGGTVTLTCGSSTGAVTSGNYPNWVQQKPGQAPRGLIGGTKFLAPGTPARFSGSLLGGKAALTLSGVQPEDEAEYYCVLWYSNRWVFGGGTKLTVL

SEQ ID NO: 1057 - DNA, 1503 bp, Artificial Sequence
  hEp 17-E9 LH x I2C HL
gacatcgtgatgacacagactccactctccctgactgtgacaccaggagagccggtctctatcagctgcaagtccagtcagagtctgttaaacagtggaaatcaaaagaactacttgacctggtacctgcagaaaccagggcagcctcctaaactgttgatctactgggcatccactagggaatctggggtccctgatcgcttctcaggcagtggatctggaacagatttcactctcaacatcagccgtgtggaggctgaagacgtgggagtttattactgtcagaatgattatagttatccgctcacgttcggtcaagggaccaagcttgagatcaaaggtggtggtggttctggcggcggcggctccggtggtggtggttctcaggtgcagctggtccagtctggagctgaggtgaaaaagcctgggtcttcagtgaaggtatcctgcaaggcttctggatacaccttctctaactactggctaggttgggtaaagcaggcgcctggacatggacttgagtggatgggagatattttccctggaagtggtaatatccactacaatgagaagttcaagggcagagtcacaatcactgcagacaaatctacgagcacagcctatatggaactcagtagcctgagatctgaggacactgctgtctattactgtgcaagactgaggaactgggacgagcctatggactactggggccaagggaccacggtcaccgtctcctccggaggtggtggatccgaggtgcagctggtcgagtctggaggaggattggtgcagcctggagggtcattgaaactctcatgtgcagcctctggattcaccttcaataagtacgccatgaactgggtccgccaggctccaggaaagggtttggaatgggttgctcgcataagaagtaaatataataattatgcaacatattatgccgattcagtgaaagacaggttcaccatctccagagatgattcaaaaaacactgcctatctacaaatgaacaacttgaaaactgaggacactgccgtgtactactgtgtgagacatgggaacttcggtaatagctacatatcctactgggcttactggggccaagggactctggtcaccgtctcctcaggtggtggtggttctggcggcggcggctccggtggtggtggttctcagactgttgtgactcaggaaccttcactcaccgtatcacctggtggaacagtcacactcacttgtggctcctcgactggggctgttacatctggcaactacccaaactgggtccaacaaaaaccaggtcaggcaccccgtggtctaataggtgggactaagttcctcgcccccggtactcctgccagattctcaggctccctgcttggaggcaaggctgccctcaccctctcaggggtacagccagaggatgaggcagaatattactgtgttctatggtacagcaaccgctgggtgttcggtggaggaaccaaactgactgtccta

SEQ ID NO: 1058 - protein, 113 aa, Artificial Sequence
  hEp 18-A6 L
DIVMTQTPLSLPVTPGEQVSMSCKSSQSLLNSGNQKNYLTWYLQKPGQSPQLLIYWASTRESGVPDRFSGSGSGTDFTLNISSVEAEDVGVYYCQNDYSYPLTFGQGTKLEIK

SEQ ID NO: 1059 - protein, 17 aa, Artificial Sequence
  hEp 18-A6 LCDR1
KSSQSLLNSGNQKNYLT

SEQ ID NO: 1060 - protein, 7 aa, Artificial Sequence
  hEp 18-A6 LCDR2
WASTRES

SEQ ID NO: 1061 - protein, 9 aa, Artificial Sequence
  hEp 18-A6 LCDR3
QNDYSYPLT

SEQ ID NO: 1062 - DNA, 339 bp, Artificial Sequence
  hEp 18-A6 L
gacatcgtgatgacacagactccactctccctgcctgtgacaccaggagagcaggtctctatgagctgcaagtccagtcagagtctgttaaacagtggaaatcaaaagaactacttgacctggtacctgcagaaaccagggcagtctcctcaactgttgatctactgggcatccactagggaatctggggtccctgatcgcttctcaggcagtggatctggaacagatttcactctcaacatcagcagtgtggaggctgaagacgtgggagtttattactgtcagaatgattatagttatccgctcacgttcggtcaagggaccaagcttgagatcaaa

SEQ ID NO: 1063 - protein, 119 aa, Artificial Sequence
  hEp 18-A6 H
QVQLVQSGAEVKKPGSSVKVSCKASGYTFSNYWLGWVRQTPGQGLEWMGDIFPGSGNIHYNEKFKGRVTITADKSTSTAYMELSSLTSEDTAVYYCARLRNWDEPMDYWGQGTTVTVSS

SEQ ID NO: 1064 - protein, 5 aa, Artificial Sequence
  hEp 18-A6 HCDR1
NYWLG

SEQ ID NO: 1065 - protein, 17 aa, Artificial Sequence
  hEp 18-A6 HCDR2
DIFPGSGNIHYNEKFKG

SEQ ID NO: 1066 - protein, 10 aa, Artificial Sequence
  hEp 18-A6 HCDR3
LRNWDEPMDY

SEQ ID NO: 1067 - DNA, 357 bp, Artificial Sequence
  hEp 18-A6 H
caggtgcagctggtccagtctggagctgaggtgaaaaagcctgggtcttcagtgaaggtatcctgcaaggcttctggatacaccttctctaactactggctaggttgggtaaggcagacgcctggacagggacttgagtggatgggagatattttccctggaagtggtaatatccactacaatgagaagttcaagggcagagtcacaatcactgcagacaaatctacgagcacagcctatatggaactcagtagcctgacatctgaggacactgctgtctattactgtgcaagactgaggaactgggacgagcctatggactactggggccaagggaccacggtcaccgtctcctcc

SEQ ID NO: 1068 - protein, 113 aa, Artificial Sequence
  hEp 18-E3 L
DIVMTQTPLSLPVTPGEPVSISCKSSQSLLNSGNQKNYLTWYLQKPGQPPQLLIYWASTRESGVPDRFSGSGSGTDFTLTISSVQAEDVGVYYCQNDYSYPLTFGQGTKLEIK

SEQ ID NO: 1069 - protein, 17 aa, Artificial Sequence
  hEp 18-E3 LCDR1
KSSQSLLNSGNQKNYLT

SEQ ID NO: 1070 - protein, 7 aa, Artificial Sequence
  hEp 18-E3 LCDR2
WASTRES

SEQ ID NO: 1071 - protein, 9 aa, Artificial Sequence
  hEp 18-E3 LCDR3
QNDYSYPLT

SEQ ID NO: 1072 - DNA, 339 bp, Artificial Sequence
  hEp 18-E3 L
gacatcgtgatgacacagactccactctccctgcctgtgacaccaggagagccggtctctatcagctgcaagtccagtcagagtctgttaaacagtggaaatcaaaagaactacttgacctggtacctgcagaaaccagggcagcctcctcaactgttgatctactgggcatccactagggaatctggggtccctgatcgcttctcaggcagtggatctggaacagatttcactctcaccatcagcagtgtgcaggctgaagacgtgggagtttattactgtcagaatgattatagttatccgctcacgttcggtcaagggaccaagcttgagatcaaa

SEQ ID NO: 1073 - protein, 119 aa, Artificial Sequence
  hEp 18-E3 H
QVQLVQSGAELVRPGSSVKISCKASGYAFSNYWLGWVRQAPGQGLEWMGDIFPGSGNIHYNEKFKGRVTLTADKSTSTAYMQLSSLTSEDTAVYYCARLRNWDEPMDYWGQGTTVTVSS

SEQ ID NO: 1074 - protein, 5 aa, Artificial Sequence
  hEp 18-E3 HCDR1
NYWLG

SEQ ID NO: 1075 - protein, 17 aa, Artificial Sequence
  hEp 18-E3 HCDR2
DIFPGSGNIHYNEKFKG

SEQ ID NO: 1076 - protein, 10 aa, Artificial Sequence
  hEp 18-E3 HCDR3
LRNWDEPMDY

SEQ ID NO: 1077 - DNA, 357 bp, Artificial Sequence
  hEp 18-E3 H
caggtgcagctggtccagtctggagctgagctggtaaggcctgggtcttcagtgaagatatcctgcaaggcttctggatacgccttctctaactactggctaggttgggtaaggcaggcgcctggacagggacttgagtggatgggagatattttccctggaagtggtaatatccactacaatgagaagttcaagggcagagtcacactcactgcagacaaatctacgagcacagcctatatgcaactcagtagcctgacatctgaggacactgctgtctattactgtgcaagactgaggaactgggacgagcctatggactactggggccaagggaccacggtcaccgtctcctcc

SEQ ID NO: 1078 - protein, 501 aa, Artificial Sequence
  hEp 18-E3 LH x I2C HL
DIVMTQTPLSLPVTPGEPVSISCKSSQSLLNSGNQKNYLTWYLQKPGQPPQLLIYWASTRESGVPDRFSGSGSGTDFTLTISSVQAEDVGVYYCQNDYSYPLTFGQGTKLEIKGGGGSGGGGSGGGGSQVQLVQSGAELVRPGSSVKISCKASGYAFSNYWLGWVRQAPGQGLEWMGDIFPGSGNIHYNEKFKGRVTLTADKSTSTAYMQLSSLTSEDTAVYYCARLRNWDEPMDYWGQGTTVTVSSGGGGSEVQLVESGGGLVQPGGSLKLSCAASGFTFNKYAMNWVRQAPGKGLEWVARIRSKYNNYATYYADSVKDRFTISRDDSKNTAYLQMNNLKTEDTAVYYCVRHGNFGNSYISYWAYWGQGTLVTVSSGGGGSGGGGSGGGGSQTVVTQEPSLTVSPGGTVTLTCGSSTGAVTSGNYPNWVQQKPGQAPRGLIGGTKFLAPGTPARFSGSLLGGKAALTLSGVQPEDEAEYYCVLWYSNRWVFGGGTKLTVL

SEQ ID NO: 1079 - DNA, 1503 bp, Artificial Sequence
  hEp 18-E3 LH x I2C HL
gacatcgtgatgacacagactccactctccctgcctgtgacaccaggagagccggtctctatcagctgcaagtccagtcagagtctgttaaacagtggaaatcaaaagaactacttgacctggtacctgcagaaaccagggcagcctcctcaactgttgatctactgggcatccactagggaatctggggtccctgatcgcttctcaggcagtggatctggaacagatttcactctcaccatcagcagtgtgcaggctgaagacgtgggagtttattactgtcagaatgattatagttatccgctcacgttcggtcaagggaccaagcttgagatcaaaggtggtggtggttctggcggcggcggctccggtggtggtggttctcaggtgcagctggtccagtctggagctgagctggtaaggcctgggtcttcagtgaagatatcctgcaaggcttctggatacgccttctctaactactggctaggttgggtaaggcaggcgcctggacagggacttgagtggatgggagatattttccctggaagtggtaatatccactacaatgagaagttcaagggcagagtcacactcactgcagacaaatctacgagcacagcctatatgcaactcagtagcctgacatctgaggacactgctgtctattactgtgcaagactgaggaactgggacgagcctatggactactggggccaagggaccacggtcaccgtctcctccggaggtggtggatccgaggtgcagctggtcgagtctggaggaggattggtgcagcctggagggtcattgaaactctcatgtgcagcctctggattcaccttcaataagtacgccatgaactgggtccgccaggctccaggaaagggtttggaatgggttgctcgcataagaagtaaatataataattatgcaacatattatgccgattcagtgaaagacaggttcaccatctccagagatgattcaaaaaacactgcctatctacaaatgaacaacttgaaaactgaggacactgccgtgtactactgtgtgagacatgggaacttcggtaatagctacatatcctactgggcttactggggccaagggactctggtcaccgtctcctcaggtggtggtggttctggcggcggcggctccggtggtggtggttctcagactgttgtgactcaggaaccttcactcaccgtatcacctggtggaacagtcacactcacttgtggctcctcgactggggctgttacatctggcaactacccaaactgggtccaacaaaaaccaggtcaggcaccccgtggtctaataggtgggactaagttcctcgcccccggtactcctgccagattctcaggctccctgcttggaggcaaggctgccctcaccctctcaggggtacagccagaggatgaggcagaatattactgtgttctatggtacagcaaccgctgggtgttcggtggaggaaccaaactgactgtccta

SEQ ID NO: 1080 - protein, 113 aa, Artificial Sequence
  hEp 18-F11 L
DIVMTQTPPSLTVTAGEPVSISCKSSQSLLNSGNQKNYLTWYLQKPGQSPQLLIYWASTRESGVPDRFSGSGSGTDFTLKISSVQAEDVGVYYCQNDYSYPLTFGQGTKLEIK

SEQ ID NO: 1081 - protein, 17 aa, Artificial Sequence
  hEp 18-F11 LCDR1
KSSQSLLNSGNQKNYLT

SEQ ID NO: 1082 - protein, 7 aa, Artificial Sequence
  hEp 18-F11 LCDR2
WASTRES

SEQ ID NO: 1083 - protein, 9 aa, Artificial Sequence
  hEp 18-F11 LCDR3
QNDYSYPLT

SEQ ID NO: 1084 - DNA, 339 bp, Artificial Sequence
  hEp 18-F11 L
gacatcgtgatgacacagactccaccctccctgactgtgacagcaggagagccggtctctatcagctgcaagtccagtcagagtctgttaaacagtggaaatcaaaagaactacttgacctggtacctgcagaaaccagggcagtctcctcaactgttgatctactgggcatccactagggaatctggggtccctgatcgcttctcaggcagtggatctggaacagatttcactctcaaaatcagcagtgtgcaggctgaagacgtgggagtttattactgtcagaatgattatagttatccgctcacgttcggtcaagggaccaagcttgagatcaaa

SEQ ID NO: 1085 - protein, 119 aa, Artificial Sequence
  hEp 18-F11 H
QVQLVQSGAEVKRPGSSVKVSCKASGYTFSNYWLGWVRQAPGQGLEWIGDIFPGSGNIHYNEKFKGRVTITADKSTSTAYMELSSLRFEDTAVYYCARLRNWDEPMDYWGQGTTVTVSS

SEQ ID NO: 1086 - protein, 5 aa, Artificial Sequence
  hEp 18-F11 HCDR1
NYWLG

SEQ ID NO: 1087 - protein, 17 aa, Artificial Sequence
  hEp 18-F11 HCDR2
DIFPGSGNIHYNEKFKG

SEQ ID NO: 1088 - protein, 10 aa, Artificial Sequence
  hEp 18-F11 HCDR3
LRNWDEPMDY

SEQ ID NO: 1089 - DNA, 357 bp, Artificial Sequence
  hEp 18-F11 H
caggtgcagctggtccagtctggagctgaggtgaaaaggcctgggtcttcagtgaaggtatcctgcaaggcttctggatacaccttctctaactactggctaggttgggtaaggcaggcgcctggacagggacttgagtggattggagatattttccctggaagtggtaatatccactacaatgagaagttcaagggcagagtcacaatcactgcagacaaatctacgagcacagcctatatggaactcagtagcctgagatttgaggacactgctgtctattactgtgcaagactgaggaactgggacgagcctatggactactggggccaagggaccacggtcaccgtctcctcc

SEQ ID NO: 1090 - protein, 501 aa, Artificial Sequence
  hEp 18-F11 LH x I2C HL
DIVMTQTPPSLTVTAGEPVSISCKSSQSLLNSGNQKNYLTWYLQKPGQSPQLLIYWASTRESGVPDRFSGSGSGTDFTLKISSVQAEDVGVYYCQNDYSYPLTFGQGTKLEIKGGGGSGGGGSGGGGSQVQLVQSGAEVKRPGSSVKVSCKASGYTFSNYWLGWVRQAPGQGLEWIGDIFPGSGNIHYNEKFKGRVTITADKSTSTAYMELSSLRFEDTAVYYCARLRNWDEPMDYWGQGTTVTVSSGGGGSEVQLVESGGGLVQPGGSLKLSCAASGFTFNKYAMNWVRQAPGKGLEWVARIRSKYNNYATYYADSVKDRFTISRDDSKNTAYLQMNNLKTEDTAVYYCVRHGNFGNSYISYWAYWGQGTLVTVSSGGGGSGGGGSGGGGSQTVVTQEPSLTVSPGGTVTLTCGSSTGAVTSGNYPNWVQQKPGQAPRGLIGGTKFLAPGTPARFSGSLLGGKAALTLSGVQPEDEAEYYCVLWYSNRWVFGGGTKLTVL

SEQ ID NO: 1091 - DNA, 1503 bp, Artificial Sequence
  hEp 18-F11 LH x I2C HL
gacatcgtgatgacacagactccaccctccctgactgtgacagcaggagagccggtctctatcagctgcaagtccagtcagagtctgttaaacagtggaaatcaaaagaactacttgacctggtacctgcagaaaccagggcagtctcctcaactgttgatctactgggcatccactagggaatctggggtccctgatcgcttctcaggcagtggatctggaacagatttcactctcaaaatcagcagtgtgcaggctgaagacgtgggagtttattactgtcagaatgattatagttatccgctcacgttcggtcaagggaccaagcttgagatcaaaggtggtggtggttctggcggcggcggctccggtggtggtggttctcaggtgcagctggtccagtctggagctgaggtgaaaaggcctgggtcttcagtgaaggtatcctgcaaggcttctggatacaccttctctaactactggctaggttgggtaaggcaggcgcctggacagggacttgagtggattggagatattttccctggaagtggtaatatccactacaatgagaagttcaagggcagagtcacaatcactgcagacaaatctacgagcacagcctatatggaactcagtagcctgagatttgaggacactgctgtctattactgtgcaagactgaggaactgggacgagcctatggactactggggccaagggaccacggtcaccgtctcctccggaggtggtggatccgaggtgcagctggtcgagtctggaggaggattggtgcagcctggagggtcattgaaactctcatgtgcagcctctggattcaccttcaataagtacgccatgaactgggtccgccaggctccaggaaagggtttggaatgggttgctcgcataagaagtaaatataataattatgcaacatattatgccgattcagtgaaagacaggttcaccatctccagagatgattcaaaaaacactgcctatctacaaatgaacaacttgaaaactgaggacactgccgtgtactactgtgtgagacatgggaacttcggtaatagctacatatcctactgggcttactggggccaagggactctggtcaccgtctcctcaggtggtggtggttctggcggcggcggctccggtggtggtggttctcagactgttgtgactcaggaaccttcactcaccgtatcacctggtggaacagtcacactcacttgtggctcctcgactggggctgttacatctggcaactacccaaactgggtccaacaaaaaccaggtcaggcaccccgtggtctaataggtgggactaagttcctcgcccccggtactcctgccagattctcaggctccctgcttggaggcaaggctgccctcaccctctcaggggtacagccagaggatgaggcagaatattactgtgttctatggtacagcaaccgctgggtgttcggtggaggaaccaaactgactgtccta

SEQ ID NO: 1092 - protein, 113 aa, Artificial Sequence
  hEp 18-F12 L
DIVMTQTPLSLTVTPGEPVSISCKSSQSLLNSGNQKNYLTWYLQKPGQPPQLLIYWASTRESGVPDRFSGSGSGTDFTLTISRVEAEDVGVYYCQNDYSYPLTFGQGTKLEIK

SEQ ID NO: 1093 - protein, 17 aa, Artificial Sequence
  hEp 18-F12 LCDR1
KSSQSLLNSGNQKNYLT

SEQ ID NO: 1094 - protein, 7 aa, Artificial Sequence
  hEp 18-F12 LCDR2
WASTRES

SEQ ID NO: 1095 - protein, 9 aa, Artificial Sequence
  hEp 18-F12 LCDR3
QNDYSYPLT

SEQ ID NO: 1096 - DNA, 339 bp, Artificial Sequence
  hEp 18-F12 L
gacatcgtgatgacacagactccactctccctgactgtgacaccaggagagccggtctctatcagctgcaagtccagtcagagtctgttaaacagtggaaatcaaaagaactacttgacctggtacctgcagaaaccagggcagcctcctcaactgttgatctactgggcatccactagggaatctggggtccctgatcgcttctcaggcagtggatctggaacagatttcactctcacaatcagccgtgtggaggctgaagacgtgggagtttattactgtcagaatgattatagttatccgctcacgttcggtcaagggaccaagcttgagatcaaa

SEQ ID NO: 1097 - protein, 119 aa, Artificial Sequence
  hEp 18-F12 H
QVQLVQSGAEVKKPGSSVKVSCKASGYTFSNYWLGWVRQRPGQGLEWIGDIFPGSGNIHYNEKFKGRATITADKSTSTAYMELSSLRSEDTAVYYCARLRNWDEPMDYWGQGTTVTVSS

SEQ ID NO: 1098 - protein, 5 aa, Artificial Sequence
  hEp 18-F12 HCDR1
NYWLG

SEQ ID NO: 1099 - protein, 17 aa, Artificial Sequence
  hEp 18-F12 HCDR2
DIFPGSGNIHYNEKFKG

SEQ ID NO: 1100 - protein, 10 aa, Artificial Sequence
  hEp 18-F12 HCDR3
LRNWDEPMDY

SEQ ID NO: 1101 - DNA, 357 bp, Artificial Sequence
  hEp 18-F12 L
caggtgcagctggtccagtctggagctgaggtgaaaaagcctgggtcttcagtgaaggtatcctgcaaggcttctggatacaccttctctaactactggctaggttgggtaaggcagaggcctggacagggacttgagtggattggagatattttccctggaagtggtaatatccactacaatgagaagttcaagggcagagccacaatcactgcagacaaatctacgagcacagcctatatggaactcagtagcctgagatctgaggacactgctgtctattactgtgcaagactgaggaactgggacgagcctatggactactggggccaagggaccacggtcaccgtctcctcc

SEQ ID NO: 1102 - protein, 501 aa, Artificial Sequence
  hEp 18-F12 LH x I2C HL
DIVMTQTPLSLTVTPGEPVSISCKSSQSLLNSGNQKNYLTWYLQKPGQPPQLLIYWASTRESGVPDRFSGSGSGTDFTLTISRVEAEDVGVYYCQNDYSYPLTFGQGTKLEIKGGGGSGGGGSGGGGSQVQLVQSGAEVKKPGSSVKVSCKASGYTFSNYWLGWVRQRPGQGLEWIGDIFPGSGNIHYNEKFKGRATITADKSTSTAYMELSSLRSEDTAVYYCARLRNWDEPMDYWGQGTTVTVSSGGGGSEVQLVESGGGLVQPGGSLKLSCAASGFTFNKYAMNWVRQAPGKGLEWVARIRSKYNNYATYYADSVKDRFTISRDDSKNTAYLQMNNLKTEDTAVYYCVRHGNFGNSYISYWAYWGQGTLVTVSSGGGGSGGGGSGGGGSQTVVTQEPSLTVSPGGTVTLTCGSSTGAVTSGNYPNWVQQKPGQAPRGLIGGTKFLAPGTPARFSGSLLGGKAALTLSGVQPEDEAEYYCVLWYSNRWVFGGGTKLTVL

SEQ ID NO: 1103 - DNA, 1503 bp, Artificial Sequence
  hEp 18-F12 LH x I2C HL
gacatcgtgatgacacagactccactctccctgactgtgacaccaggagagccggtctctatcagctgcaagtccagtcagagtctgttaaacagtggaaatcaaaagaactacttgacctggtacctgcagaaaccagggcagcctcctcaactgttgatctactgggcatccactagggaatctggggtccctgatcgcttctcaggcagtggatctggaacagatttcactctcacaatcagccgtgtggaggctgaagacgtgggagtttattactgtcagaatgattatagttatccgctcacgttcggtcaagggaccaagcttgagatcaaaggtggtggtggttctggcggcggcggctccggtggtggtggttctcaggtgcagctggtccagtctggagctgaggtgaaaaagcctgggtcttcagtgaaggtatcctgcaaggcttctggatacaccttctctaactactggctaggttgggtaaggcagaggcctggacagggacttgagtggattggagatattttccctggaagtggtaatatccactacaatgagaagttcaagggcagagccacaatcactgcagacaaatctacgagcacagcctatatggaactcagtagcctgagatctgaggacactgctgtctattactgtgcaagactgaggaactgggacgagcctatggactactggggccaagggaccacggtcaccgtctcctccggaggtggtggatccgaggtgcagctggtcgagtctggaggaggattggtgcagcctggagggtcattgaaactctcatgtgcagcctctggattcaccttcaataagtacgccatgaactgggtccgccaggctccaggaaagggtttggaatgggttgctcgcataagaagtaaatataataattatgcaacatattatgccgattcagtgaaagacaggttcaccatctccagagatgattcaaaaaacactgcctatctacaaatgaacaacttgaaaactgaggacactgccgtgtactactgtgtgagacatgggaacttcggtaatagctacatatcctactgggcttactggggccaagggactctggtcaccgtctcctcaggtggtggtggttctggcggcggcggctccggtggtggtggttctcagactgttgtgactcaggaaccttcactcaccgtatcacctggtggaacagtcacactcacttgtggctcctcgactggggctgttacatctggcaactacccaaactgggtccaacaaaaaccaggtcaggcaccccgtggtctaataggtgggactaagttcctcgcccccggtactcctgccagattctcaggctccctgcttggaggcaaggctgccctcaccctctcaggggtacagccagaggatgaggcagaatattactgtgttctatggtacagcaaccgctgggtgttcggtggaggaaccaaactgactgtccta

SEQ ID NO: 1104 - protein, 113 aa, Artificial Sequence
  hEp 18-G1 L
DIVMTQTPLSLTVTPGETVSISCKSSQSLLNSGNQKNYLTWYLQKPGQSPQLLIYWASTRESGVPDRFSGSGSGTDFTLTISSVEAEDVGVYYCQNDYSYPLTFGQGTKLEIK

SEQ ID NO: 1105 - protein, 17 aa, Artificial Sequence
  hEp 18-G1 LCDR1
KSSQSLLNSGNQKNYLT

SEQ ID NO: 1106 - protein, 7 aa, Artificial Sequence
  hEp 18-G1 LCDR2
WASTRES

SEQ ID NO: 1107 - protein, 9 aa, Artificial Sequence
  hEp 18-G1 LCDR3
QNDYSYPLT

SEQ ID NO: 1108 - DNA, 339 bp, Artificial Sequence
  hEp 18-G1 L
gacatcgtgatgacacagactccactctccctgactgtgacaccaggagagacggtctctatcagctgcaagtccagtcagagtctgttaaacagtggaaatcaaaagaactacttgacctggtacctgcagaaaccagggcagtctcctcaactgttgatctactgggcatccactagggaatctggggtccctgatcgcttctcaggcagtggatctggaacagatttcactctcacaatcagcagtgtggaggctgaagacgtgggagtttattactgtcagaatgattatagttatccgctcacgttcggtcaagggaccaagcttgagatcaaa

SEQ ID NO: 1109 - protein, 119 aa, Artificial Sequence
  hEp 18-G1 H
QVQLVQSGAEVVKPGSSVKVSCKASGYTFSNYWLGWVRQTPGQGLEWIGDIFPGSGNIHYNEKFKGKVTITADKSTSTAYMELSSLGSEDTAVYYCARLRNWDEPMDYWGQGTTVTVSS

SEQ ID NO: 1110 - protein, 5 aa, Artificial Sequence
  hEp 18-G1 HCDR1
NYWLG

SEQ ID NO: 1111 - protein, 17 aa, Artificial Sequence
  hEp 18-G1 HCDR2
DIFPGSGNIHYNEKFKG

SEQ ID NO: 1112 - protein, 10 aa, Artificial Sequence
  hEp 18-G1 HCDR3
LRNWDEPMDY

SEQ ID NO: 1113 - DNA, 357 bp, Artificial Sequence
  hEp 18-G1 H
caggtgcagctggtccagtctggagctgaggtggtaaagcctgggtcttcagtgaaggtatcctgcaaggcttctggatacaccttctctaactactggctaggttgggtaaggcagacgcctggacagggacttgagtggattggagatattttccctggaagtggtaatatccactacaatgagaagttcaagggcaaagtcacaatcactgcagacaaatctacgagcacagcctatatggaactcagtagcctgggatctgaggacactgctgtctattactgtgcaagactgaggaactgggacgagcctatggactactggggccaagggaccacggtcaccgtctcctcc

SEQ ID NO: 1114 - protein, 501 aa, Artificial Sequence
  hEp 18-G1 LH x I2C HL
DIVMTQTPLSLTVTPGETVSISCKSSQSLLNSGNQKNYLTWYLQKPGQSPQLLIYWASTRESGVPDRFSGSGSGTDFTLTISSVEAEDVGVYYCQNDYSYPLTFGQGTKLEIKGGGGSGGGGSGGGGSQVQLVQSGAEVVKPGSSVKVSCKASGYTFSNYWLGWVRQTPGQGLEWIGDIFPGSGNIHYNEKFKGKVTITADKSTSTAYMELSSLGSEDTAVYYCARLRNWDEPMDYWGQGTTVTVSSGGGGSEVQLVESGGGLVQPGGSLKLSCAASGFTFNKYAMNWVRQAPGKGLEWVARIRSKYNNYATYYADSVKDRFTISRDDSKNTAYLQMNNLKTEDTAVYYCVRHGNFGNSYISYWAYWGQGTLVTVSSGGGGSGGGGSGGGGSQTVVTQEPSLTVSPGGTVTLTCGSSTGAVTSGNYPNWVQQKPGQAPRGLIGGTKFLAPGTPARFSGSLLGGKAALTLSGVQPEDEAEYYCVLWYSNRWVFGGGTKLTVL

SEQ ID NO: 1115 - DNA, 1503 bp, Artificial Sequence
  hEp 18-G1 LH x I2C HL
gacatcgtgatgacacagactccactctccctgactgtgacaccaggagagacggtctctatcagctgcaagtccagtcagagtctgttaaacagtggaaatcaaaagaactacttgacctggtacctgcagaaaccagggcagtctcctcaactgttgatctactgggcatccactagggaatctggggtccctgatcgcttctcaggcagtggatctggaacagatttcactctcacaatcagcagtgtggaggctgaagacgtgggagtttattactgtcagaatgattatagttatccgctcacgttcggtcaagggaccaagcttgagatcaaaggtggtggtggttctggcggcggcggctccggtggtggtggttctcaggtgcagctggtccagtctggagctgaggtggtaaagcctgggtcttcagtgaaggtatcctgcaaggcttctggatacaccttctctaactactggctaggttgggtaaggcagacgcctggacagggacttgagtggattggagatattttccctggaagtggtaatatccactacaatgagaagttcaagggcaaagtcacaatcactgcagacaaatctacgagcacagcctatatggaactcagtagcctgggatctgaggacactgctgtctattactgtgcaagactgaggaactgggacgagcctatggactactggggccaagggaccacggtcaccgtctcctccggaggtggtggatccgaggtgcagctggtcgagtctggaggaggattggtgcagcctggagggtcattgaaactctcatgtgcagcctctggattcaccttcaataagtacgccatgaactgggtccgccaggctccaggaaagggtttggaatgggttgctcgcataagaagtaaatataataattatgcaacatattatgccgattcagtgaaagacaggttcaccatctccagagatgattcaaaaaacactgcctatctacaaatgaacaacttgaaaactgaggacactgccgtgtactactgtgtgagacatgggaacttcggtaatagctacatatcctactgggcttactggggccaagggactctggtcaccgtctcctcaggtggtggtggttctggcggcggcggctccggtggtggtggttctcagactgttgtgactcaggaaccttcactcaccgtatcacctggtggaacagtcacactcacttgtggctcctcgactggggctgttacatctggcaactacccaaactgggtccaacaaaaaccaggtcaggcaccccgtggtctaataggtgggactaagttcctcgcccccggtactcctgccagattctcaggctccctgcttggaggcaaggctgccctcaccctctcaggggtacagccagaggatgaggcagaatattactgtgttctatggtacagcaaccgctgggtgttcggtggaggaaccaaactgactgtccta

SEQ ID NO: 1116 - protein, 113 aa, Artificial Sequence
  hEp 18-G9 L
DIVMTQTPLSLTVTPGEPVSISCKSSQSLLNSGNQKNYLTWYLQKPGQSPQLLIYWASTRESGVPDRFSGSGSGTDFTLKISRVEAEDVGVYYCQNDYSYPLTFGQGTKLEIK

SEQ ID NO: 1117 - protein, 17 aa, Artificial Sequence
  hEp 18-G9 LCDR1
KSSQSLLNSGNQKNYLT

SEQ ID NO: 1118 - protein, 7 aa, Artificial Sequence
  hEp 18-G9 LCDR2
WASTRES

SEQ ID NO: 1119 - protein, 9 aa, Artificial Sequence
  hEp 18-G9 LCDR3
QNDYSYPLT

SEQ ID NO: 1120 - DNA, 339 bp, Artificial Sequence
  hEp 18-G9 L
gacatcgtgatgacacagactccactctccctgactgtgacaccaggagagccggtctctatcagctgcaagtccagtcagagtctgttaaacagtggaaatcaaaagaactacttgacctggtacctgcagaaaccagggcagtctcctcaactgttgatctactgggcatccactagggaatctggggtccctgatcgcttctcaggcagtggatctggaacagatttcactctcaaaatcagccgtgtggaggctgaagacgtgggagtttattactgtcagaatgattatagttatccgctcacgttcggtcaagggaccaagcttgagatcaaa

SEQ ID NO: 1121 - protein, 119 aa, Artificial Sequence
  hEp 18-G9 H
QVQLVQSGAEVKKPGSSVKVSCKASGYTFSNYWLGWVRQTPGQGLEWMGDIFPGSGNIHYNEKFKGRATITADKSTSTAYMELSSLTSEDTAVYYCARLRNWDEPMDYWGQGTTVTVSS

SEQ ID NO: 1122 - protein, 5 aa, Artificial Sequence
  hEp 18-G9 HCDR1
NYWLG

SEQ ID NO: 1123 - protein, 17 aa, Artificial Sequence
  hEp 18-G9 HCDR2
DIFPGSGNIHYNEKFKG

SEQ ID NO: 1124 - protein, 10 aa, Artificial Sequence
  hEp 18-G9 HCDR3
LRNWDEPMDY

SEQ ID NO: 1125 - DNA, 357 bp, Artificial Sequence
  hEp 18-G9 H
caggtgcagctggtccagtctggagctgaggtgaaaaagcctgggtcttcagtgaaggtatcctgcaaggcttctggatacaccttctctaactactggctaggttgggtaaggcagacgcctggacagggacttgagtggatgggagatattttccctggaagtggtaatatccactacaatgagaagttcaagggcagagccacaatcactgcagacaaatctacgagcacagcctatatggaactcagtagcctgacatctgaggacactgctgtctattactgtgcaagactgaggaactgggacgagcctatggactactggggccaagggaccacggtcaccgtctcctcc

SEQ ID NO: 1126 - protein, 501 aa, Artificial Sequence
  hEp 18-G9 LH x I2C HL
DIVMTQTPLSLTVTPGEPVSISCKSSQSLLNSGNQKNYLTWYLQKPGQSPQLLIYWASTRESGVPDRFSGSGSGTDFTLKISRVEAEDVGVYYCQNDYSYPLTFGQGTKLEIKGGGGSGGGGSGGGGSQVQLVQSGAEVKKPGSSVKVSCKASGYTFSNYWLGWVRQTPGQGLEWMGDIFPGSGNIHYNEKFKGRATITADKSTSTAYMELSSLTSEDTAVYYCARLRNWDEPMDYWGQGTTVTVSSGGGGSEVQLVESGGGLVQPGGSLKLSCAASGFTFNKYAMNWVRQAPGKGLEWVARIRSKYNNYATYYADSVKDRFTISRDDSKNTAYLQMNNLKTEDTAVYYCVRHGNFGNSYISYWAYWGQGTLVTVSSGGGGSGGGGSGGGGSQTVVTQEPSLTVSPGGTVTLTCGSSTGAVTSGNYPNWVQQKPGQAPRGLIGGTKFLAPGTPARFSGSLLGGKAALTLSGVQPEDEAEYYCVLWYSNRWVFGGGTKLTVL

SEQ ID NO: 1127 - DNA, 1503 bp, Artificial Sequence
  hEp 18-G9 LH x I2C HL
gacatcgtgatgacacagactccactctccctgactgtgacaccaggagagccggtctctatcagctgcaagtccagtcagagtctgttaaacagtggaaatcaaaagaactacttgacctggtacctgcagaaaccagggcagtctcctcaactgttgatctactgggcatccactagggaatctggggtccctgatcgcttctcaggcagtggatctggaacagatttcactctcaaaatcagccgtgtggaggctgaagacgtgggagtttattactgtcagaatgattatagttatccgctcacgttcggtcaagggaccaagcttgagatcaaaggtggtggtggttctggcggcggcggctccggtggtggtggttctcaggtgcagctggtccagtctggagctgaggtgaaaaagcctgggtcttcagtgaaggtatcctgcaaggcttctggatacaccttctctaactactggctaggttgggtaaggcagacgcctggacagggacttgagtggatgggagatattttccctggaagtggtaatatccactacaatgagaagttcaagggcagagccacaatcactgcagacaaatctacgagcacagcctatatggaactcagtagcctgacatctgaggacactgctgtctattactgtgcaagactgaggaactgggacgagcctatggactactggggccaagggaccacggtcaccgtctcctccggaggtggtggatccgaggtgcagctggtcgagtctggaggaggattggtgcagcctggagggtcattgaaactctcatgtgcagcctctggattcaccttcaataagtacgccatgaactgggtccgccaggctccaggaaagggtttggaatgggttgctcgcataagaagtaaatataataattatgcaacatattatgccgattcagtgaaagacaggttcaccatctccagagatgattcaaaaaacactgcctatctacaaatgaacaacttgaaaactgaggacactgccgtgtactactgtgtgagacatgggaacttcggtaatagctacatatcctactgggcttactggggccaagggactctggtcaccgtctcctcaggtggtggtggttctggcggcggcggctccggtggtggtggttctcagactgttgtgactcaggaaccttcactcaccgtatcacctggtggaacagtcacactcacttgtggctcctcgactggggctgttacatctggcaactacccaaactgggtccaacaaaaaccaggtcaggcaccccgtggtctaataggtgggactaagttcctcgcccccggtactcctgccagattctcaggctccctgcttggaggcaaggctgccctcaccctctcaggggtacagccagaggatgaggcagaatattactgtgttctatggtacagcaaccgctgggtgttcggtggaggaaccaaactgactgtccta

SEQ ID NO: 1128 - protein, 314 aa, Homo sapiens
MAPPQVLAFGLLLAAATATFAAAQEECVCENYKLAVNCFVNNNRQCQCTSVGAQNTVICSKLAAKCLVMKAEMNGSKLGRRAKPEGALQNNDGLYDPDCDESGLFKAKQCNGTSTCWCVNTAGVRRTDKDTEITCSERVRTYWIIIELKHKAREKPYDSKSLRTALQKEITTRYQLDPKFITSILYENNVITIDLVQNSSQKTQNDVDIADVAYYFEKDVKGESLFHSKKMDLTVNGEQLDLDPGQTLIYYVDEKAPEFSMQGLKAGVIAVIVVVVIAVVAGIVVLVISRKKRMAKYEKAEIKEMGEMHRELNA

SEQ ID NO: 1129 - DNA, 1528 bp, Homo sapiens
cggcgagcgagcaccttcgacgcggtccggggaccccctcgtcgctgtcctcccgacgcggacccgcgtgccccaggcctcgcgctgcccggccggctcctcgtgtcccactcccggcgcacgccctcccgcgagtcccgggcccctcccgcgcccctcttctcggcgcgcgcgcagcatggcgcccccgcaggtcctcgcgttcgggcttctgcttgccgcggcgacggcgacttttgccgcagctcaggaagaatgtgtctgtgaaaactacaagctggccgtaaactgctttgtgaataataatcgtcaatgccagtgtacttcagttggtgcacaaaatactgtcatttgctcaaagctggctgccaaatgtttggtgatgaaggcagaaatgaatggctcaaaacttgggagaagagcaaaacctgaaggggccctccagaacaatgatgggctttatgatcctgactgcgatgagagcgggctctttaaggccaagcagtgcaacggcacctccacgtgctggtgtgtgaacactgctggggtcagaagaacagacaaggacactgaaataacctgctctgagcgagtgagaacctactggatcatcattgaactaaaacacaaagcaagagaaaaaccttatgatagtaaaagtttgcggactgcacttcagaaggagatcacaacgcgttatcaactggatccaaaatttatcacgagtattttgtatgagaataatgttatcactattgatctggttcaaaattcttctcaaaaaactcagaatgatgtggacatagctgatgtggcttattattttgaaaaagatgttaaaggtgaatccttgtttcattctaagaaaatggacctgacagtaaatggggaacaactggatctggatcctggtcaaactttaatttattatgttgatgaaaaagcacctgaattctcaatgcagggtctaaaagctggtgttattgctgttattgtggttgtggtgatagcagttgttgctggaattgttgtgctggttatttccagaaagaagagaatggcaaagtatgagaaggctgagataaaggagatgggtgagatgcatagggaactcaatgcataactatataatttgaagattatagaagaagggaaatagcaaatggacacaaattacaaatgtgtgtgcgtgggacgaagacatctttgaaggtcatgagtttgttagtttaacatcatatatttgtaatagtgaaacctgtactcaaaatataagcagcttgaaactggctttaccaatcttgaaatttgaccacaagtgtcttatatatgcagatctaatgtaaaatccagaacttggactccatcgttaaaattatttatgtgtaacattcaaatgtgtgcattaaatatgcttccacagtaaaatctgaaaaactgatttgtgattgaaagctgcctttctatttacttgagtcttgtacatacatacttttttatgagctatgaaataaaacattttaaactg

SEQ ID NO: 1130 - protein, 36 aa, Homo sapiens
ECVCENYKLAVNCFVNNNRQCQCTSVGAQNTVICSK

SEQ ID NO: 1131 - protein, 113 aa, Artificial Sequence
  FAP L
DIVMTQSPDSLAVSLGERATINCKSSQSLLYSRNQKNYLAWYQQKPGQPPKLLIFWASTRESGVPDRFSGSGFGTDFTLTISSLQAEDVAVYYCQQYFSYPLTFGQGTKVEIK

SEQ ID NO: 1132 - protein, 17 aa, Artificial Sequence
  FAP L-CDR1
KSSQSLLYSRNQKNYLA

SEQ ID NO: 1133 - protein, 7 aa, Artificial Sequence
  FAP L-CDR2
WASTRES

SEQ ID NO: 1134 - protein, 9 aa, Artificial Sequence
  FAP L-CDR3
QQYFSYPLT

SEQ ID NO: 1135 - DNA, 339 bp, Artificial Sequence
  FAP L
gacattgtgatgacccagtctccagactctttggctgtgtctctaggggagagggccaccatcaactgcaagtccagtcagagccttttatattctagaaatcaaaagaactacttggcctggtatcagcagaaaccaggacagccacccaaactcctcatcttttgggctagcactagggaatctggggtacctgataggttcagtggcagtgggtttgggacagacttcaccctcaccattagcagcctgcaggctgaagatgtggcagtttattactgtcagcaatattttagctatccgctcacgttcggacaagggaccaaggtggaaataaaa

SEQ ID NO: 1136 - protein, 124 aa, Artificial Sequence
  FAP H
QVQLVQSGAEVKKPGASVKVSCKTSRYTFTEYTIHWVRQAPGQRLEWIGGINPNNGIPNYNQKFKGRVTITVDTSASTAYMELSSLRSEDTAVYYCARRRIAYGYDEGHAMDYWGQGTLVTVSS

SEQ ID NO: 1137 - protein, 5 aa, Artificial Sequence
  FAP H-CDR1
EYTIH

SEQ ID NO: 1138 - protein, 17 aa, Artificial Sequence
  FAP H-CDR2
GINPNNGIPNYNQKFKG

SEQ ID NO: 1139 - protein, 15 aa, Artificial Sequence
  FAP H-CDR3
RRIAYGYDEGHAMDY

SEQ ID NO: 1140 - DNA, 372 bp, Artificial Sequence
  FAP H
caggtgcaactagtgcagtccggcgccgaagtgaagaaacccggtgcttccgtgaaagtcagctgtaaaactagtagatacaccttcactgaatacaccatacactgggttagacaggcccctggccaaaggctggagtggataggaggtattaatcctaacaatggtattcctaactacaaccagaagttcaagggccgggtcaccatcaccgtagacacctctgccagcaccgcctacatggaactgtccagcctgcgctccgaggacactgcagtctactactgcgccagaagaagaatcgcctatggttacgacgagggccatgctatggactactggggtcaaggaacccttgtcaccgtctcctcc

SEQ ID NO: 1141 - protein, 252 aa, Artificial Sequence
  FAP LH
DIVMTQSPDSLAVSLGERATINCKSSQSLLYSRNQKNYLAWYQQKPGQPPKLLIFWASTRESGVPDRFSGSGFGTDFTLTISSLQAEDVAVYYCQQYFSYPLTFGQGTKVEIKGGGGSGGGGSGGGGSQVQLVQSGAEVKKPGASVKVSCKTSRYTFTEYTIHWVRQAPGQRLEWIGGINPNNGIPNYNQKFKGRVTITVDTSASTAYMELSSLRSEDTAVYYCARRRIAYGYDEGHAMDYWGQGTLVTVSS

SEQ ID NO: 1142 - DNA, 756 bp, Artificial Sequence
  FAP LH
gacattgtgatgacccagtctccagactctttggctgtgtctctaggggagagggccaccatcaactgcaagtccagtcagagccttttatattctagaaatcaaaagaactacttggcctggtatcagcagaaaccaggacagccacccaaactcctcatcttttgggctagcactagggaatctggggtacctgataggttcagtggcagtgggtttgggacagacttcaccctcaccattagcagcctgcaggctgaagatgtggcagtttattactgtcagcaatattttagctatccgctcacgttcggacaagggaccaaggtggaaataaaaggtggtggtggttctggcggcggcggctccggtggtggtggttctcaggtgcaactagtgcagtccggcgccgaagtgaagaaacccggtgcttccgtgaaagtcagctgtaaaactagtagatacaccttcactgaatacaccatacactgggttagacaggcccctggccaaaggctggagtggataggaggtattaatcctaacaatggtattcctaactacaaccagaagttcaagggccgggtcaccatcaccgtagacacctctgccagcaccgcctacatggaactgtccagcctgcgctccgaggacactgcagtctactactgcgccagaagaagaatcgcctatggttacgacgagggccatgctatggactactggggtcaaggaacccttgtcaccgtctcctcc

SEQ ID NO: 1143 - protein, 506 aa, Artificial Sequence
  FAP LH x I2C HL
DIVMTQSPDSLAVSLGERATINCKSSQSLLYSRNQKNYLAWYQQKPGQPPKLLIFWASTRESGVPDRFSGSGFGTDFTLTISSLQAEDVAVYYCQQYFSYPLTFGQGTKVEIKGGGGSGGGGSGGGGSQVQLVQSGAEVKKPGASVKVSCKTSRYTFTEYTIHWVRQAPGQRLEWIGGINPNNGIPNYNQKFKGRVTITVDTSASTAYMELSSLRSEDTAVYYCARRRIAYGYDEGHAMDYWGQGTLVTVSSGGGGSEVQLVESGGGLVQPGGSLKLSCAASGFTFNKYAMNWVRQAPGKGLEWVARIRSKYNNYATYYADSVKDRFTISRDDSKNTAYLQMNNLKTEDTAVYYCVRHGNFGNSYISYWAYWGQGTLVTVSSGGGGSGGGGSGGGGSQTVVTQEPSLTVSPGGTVTLTCGSSTGAVTSGNYPNWVQQKPGQAPRGLIGGTKFLAPGTPARFSGSLLGGKAALTLSGVQPEDEAEYYCVLWYSNRWVFGGGTKLTVL

SEQ ID NO: 1144 - DNA, 1518 bp, Artificial Sequence
  FAP LH x I2C HL
gacattgtgatgacccagtctccagactctttggctgtgtctctaggggagagggccaccatcaactgcaagtccagtcagagccttttatattctagaaatcaaaagaactacttggcctggtatcagcagaaaccaggacagccacccaaactcctcatcttttgggctagcactagggaatctggggtacctgataggttcagtggcagtgggtttgggacagacttcaccctcaccattagcagcctgcaggctgaagatgtggcagtttattactgtcagcaatattttagctatccgctcacgttcggacaagggaccaaggtggaaataaaaggtggtggtggttctggcggcggcggctccggtggtggtggttctcaggtgcaactagtgcagtccggcgccgaagtgaagaaacccggtgcttccgtgaaagtcagctgtaaaactagtagatacaccttcactgaatacaccatacactgggttagacaggcccctggccaaaggctggagtggataggaggtattaatcctaacaatggtattcctaactacaaccagaagttcaagggccgggtcaccatcaccgtagacacctctgccagcaccgcctacatggaactgtccagcctgcgctccgaggacactgcagtctactactgcgccagaagaagaatcgcctatggttacgacgagggccatgctatggactactggggtcaaggaacccttgtcaccgtctcctccggaggtggtggatccgaggtgcagctggtcgagtctggaggaggattggtgcagcctggagggtcattgaaactctcatgtgcagcctctggattcaccttcaataagtacgccatgaactgggtccgccaggctccaggaaagggtttggaatgggttgctcgcataagaagtaaatataataattatgcaacatattatgccgattcagtgaaagacaggttcaccatctccagagatgattcaaaaaacactgcctatctacaaatgaacaacttgaaaactgaggacactgccgtgtactactgtgtgagacatgggaacttcggtaatagctacatatcctactgggcttactggggccaagggactctggtcaccgtctcctcaggtggtggtggttctggcggcggcggctccggtggtggtggttctcagactgttgtgactcaggaaccttcactcaccgtatcacctggtggaacagtcacactcacttgtggctcctcgactggggctgttacatctggcaactacccaaactgggtccaacaaaaaccaggtcaggcaccccgtggtctaataggtgggactaagttcctcgcccccggtactcctgccagattctcaggctccctgcttggaggcaaggctgccctcaccctctcaggggtacagccagaggatgaggcagaatattactgtgttctatggtacagcaaccgctgggtgttcggtggaggaaccaaactgactgtccta

SEQ ID NO: 1145 - protein, 506 aa, Artificial Sequence
  FAP  LH x H2C HL
DIVMTQSPDSLAVSLGERATINCKSSQSLLYSRNQKNYLAWYQQKPGQPPKLLIFWASTRESGVPDRFSGSGFGTDFTLTISSLQAEDVAVYYCQQYFSYPLTFGQGTKVEIKGGGGSGGGGSGGGGSQVQLVQSGAEVKKPGASVKVSCKTSRYTFTEYTIHWVRQAPGQRLEWIGGINPNNGIPNYNQKFKGRVTITVDTSASTAYMELSSLRSEDTAVYYCARRRIAYGYDEGHAMDYWGQGTLVTVSSGGGGSEVQLVESGGGLVQPGGSLKLSCAASGFTFNKYAMNWVRQAPGKGLEWVARIRSKYNNYATYYADSVKDRFTISRDDSKNTAYLQMNNLKTEDTAVYYCVRHGNFGNSYISYWAYWGQGTLVTVSSGGGGSGGGGSGGGGSQTVVTQEPSLTVSPGGTVTLTCGSSTGAVTSGYYPNWVQQKPGQAPRGLIGGTKFLAPGTPARFSGSLLGGKAALTLSGVQPEDEAEYYCALWYSNRWVFGGGTKLTVL

SEQ ID NO: 1146 - DNA, 1518 bp, Artificial Sequence
  FAP  LH x H2C HL
gacattgtgatgacccagtctccagactctttggctgtgtctctaggggagagggccaccatcaactgcaagtccagtcagagccttttatattctagaaatcaaaagaactacttggcctggtatcagcagaaaccaggacagccacccaaactcctcatcttttgggctagcactagggaatctggggtacctgataggttcagtggcagtgggtttgggacagacttcaccctcaccattagcagcctgcaggctgaagatgtggcagtttattactgtcagcaatattttagctatccgctcacgttcggacaagggaccaaggtggaaataaaaggtggtggtggttctggcggcggcggctccggtggtggtggttctcaggtgcaactagtgcagtccggcgccgaagtgaagaaacccggtgcttccgtgaaagtcagctgtaaaactagtagatacaccttcactgaatacaccatacactgggttagacaggcccctggccaaaggctggagtggataggaggtattaatcctaacaatggtattcctaactacaaccagaagttcaagggccgggtcaccatcaccgtagacacctctgccagcaccgcctacatggaactgtccagcctgcgctccgaggacactgcagtctactactgcgccagaagaagaatcgcctatggttacgacgagggccatgctatggactactggggtcaaggaacccttgtcaccgtctcctccggaggtggtggatccgaggtgcagctggtcgagtctggaggaggattggtgcagcctggagggtcattgaaactctcatgtgcagcctctggattcaccttcaataagtacgccatgaactgggtccgccaggctccaggaaagggtttggaatgggttgctcgcataagaagtaaatataataattatgcaacatattatgccgattcagtgaaagacaggttcaccatctccagagatgattcaaaaaacactgcctatctacaaatgaacaacttgaaaactgaggacactgccgtgtactactgtgtgagacatgggaacttcggtaatagctacatatcctactgggcttactggggccaagggactctggtcaccgtctcctcaggtggtggtggttctggcggcggcggctccggtggtggtggttctcagactgttgtgactcaggaaccttcactcaccgtatcacctggtggaacagtcacactcacttgtggctcctcgactggggctgttacatctggctactacccaaactgggtccaacaaaaaccaggtcaggcaccccgtggtctaataggtgggactaagttcctcgcccccggtactcctgccagattctcaggctccctgcttggaggcaaggctgccctcaccctctcaggggtacagccagaggatgaggcagaatattactgtgctctatggtacagcaaccgctgggtgttcggtggaggaaccaaactgactgtccta

SEQ ID NO: 1147 - protein, 506 aa, Artificial Sequence
  FAP  LH x F12Q HL
DIVMTQSPDSLAVSLGERATINCKSSQSLLYSRNQKNYLAWYQQKPGQPPKLLIFWASTRESGVPDRFSGSGFGTDFTLTISSLQAEDVAVYYCQQYFSYPLTFGQGTKVEIKGGGGSGGGGSGGGGSQVQLVQSGAEVKKPGASVKVSCKTSRYTFTEYTIHWVRQAPGQRLEWIGGINPNNGIPNYNQKFKGRVTITVDTSASTAYMELSSLRSEDTAVYYCARRRIAYGYDEGHAMDYWGQGTLVTVSSGGGGSEVQLVESGGGLVQPGGSLKLSCAASGFTFNSYAMNWVRQAPGKGLEWVARIRSKYNNYATYYADSVKGRFTISRDDSKNTAYLQMNNLKTEDTAVYYCVRHGNFGNSYVSWWAYWGQGTLVTVSSGGGGSGGGGSGGGGSQTVVTQEPSLTVSPGGTVTLTCGSSTGAVTSGNYPNWVQQKPGQAPRGLIGGTKFLAPGTPARFSGSLLGGKAALTLSGVQPEDEAEYYCVLWYSNRWVFGGGTKLTVL

SEQ ID NO: 1148 - DNA, 1518 bp, Artificial Sequence
  FAP  LH x F12Q HL
gacattgtgatgacccagtctccagactctttggctgtgtctctaggggagagggccaccatcaactgcaagtccagtcagagccttttatattctagaaatcaaaagaactacttggcctggtatcagcagaaaccaggacagccacccaaactcctcatcttttgggctagcactagggaatctggggtacctgataggttcagtggcagtgggtttgggacagacttcaccctcaccattagcagcctgcaggctgaagatgtggcagtttattactgtcagcaatattttagctatccgctcacgttcggacaagggaccaaggtggaaataaaaggtggtggtggttctggcggcggcggctccggtggtggtggttctcaggtgcaactagtgcagtccggcgccgaagtgaagaaacccggtgcttccgtgaaagtcagctgtaaaactagtagatacaccttcactgaatacaccatacactgggttagacaggcccctggccaaaggctggagtggataggaggtattaatcctaacaatggtattcctaactacaaccagaagttcaagggccgggtcaccatcaccgtagacacctctgccagcaccgcctacatggaactgtccagcctgcgctccgaggacactgcagtctactactgcgccagaagaagaatcgcctatggttacgacgagggccatgctatggactactggggtcaaggaacccttgtcaccgtctcctccggaggtggtggatccgaggtgcagctggtcgagtctggaggaggattggtgcagcctggagggtcattgaaactctcatgtgcagcctctggattcaccttcaatagctacgccatgaactgggtccgccaggctccaggaaagggtttggaatgggttgctcgcataagaagtaaatataataattatgcaacatattatgccgattcagtgaaaggcaggttcaccatctccagagatgattcaaaaaacactgcctatctacaaatgaacaacttgaaaactgaggacactgccgtgtactactgtgtgagacatgggaacttcggtaatagctacgtttcctggtgggcttactggggccaagggactctggtcaccgtctcctcaggtggtggtggttctggcggcggcggctccggtggtggtggttctcagactgttgtgactcaggaaccttcactcaccgtatcacctggtggaacagtcacactcacttgtggctcctcgactggggctgttacatctggcaactacccaaactgggtccaacaaaaaccaggtcaggcaccccgtggtctaataggtgggactaagttcctcgcccccggtactcctgccagattctcaggctccctgcttggaggcaaggctgccctcaccctctcaggggtacagccagaggatgaggcagaatattactgtgttctatggtacagcaaccgctgggtgttcggtggaggaaccaaactgactgtccta

SEQ ID NO: 1149 - DNA, 2283 bp, Artificial Sequence
  FAP alpha
atgaagacttgggtaaaaatcgtatttggagttgccacctctgctgtgcttgccttattggtgatgtgcattgtcttacgcccttcaagagttcataactctgaagaaaatacaatgagagcactcacactgaaggatattttaaatggaacattttcttataaaacattttttccaaactggatttcaggacaagaatatcttcatcaatctgcagataacaatatagtactttataatattgaaacaggacaatcatataccattttgagtaatagaaccatgaaaagtgtgaatgcttcaaattacggcttatcacctgatcggcaatttgtatatctagaaagtgattattcaaagctttggagatactcttacacagcaacatattacatctatgaccttagcaatggagaatttgtaagaggaaatgagcttcctcgtccaattcagtatttatgctggtcgcctgttgggagtaaattagcatatgtctatcaaaacaatatctatttgaaacaaagaccaggagatccaccttttcaaataacatttaatggaagagaaaataaaatatttaatggaatcccagactgggtttatgaagaggaaatgcttgctacaaaatatgctctctggtggtctcctaatggaaaatttttggcatatgcggaatttaatgatacggatataccagttattgcctattcctattatggcgatgaacaatatcctagaacaataaatattccatacccaaaggctggagctaagaatcccgttgttcggatatttattatcgataccacttaccctgcgtatgtaggtccccaggaagtgcctgttccagcaatgatagcctcaagtgattattatttcagttggctcacgtgggttactgatgaacgagtatgtttgcagtggctaaaaagagtccagaatgtttcggtcctgtctatatgtgacttcagggaagactggcagacatgggattgtccaaagacccaggagcatatagaagaaagcagaactggatgggctggtggattctttgtttcaacaccagttttcagctatgatgccatttcgtactacaaaatatttagtgacaaggatggctacaaacatattcactatatcaaagacactgtggaaaatgctattcaaattacaagtggcaagtgggaggccataaatatattcagagtaacacaggattcactgttttattctagcaatgaatttgaagaataccctggaagaagaaacatctacagaattagcattggaagctatcctccaagcaagaagtgtgttacttgccatctaaggaaagaaaggtgccaatattacacagcaagtttcagcgactacgccaagtactatgcacttgtctgctacggcccaggcatccccatttccacccttcatgatggacgcactgatcaagaaattaaaatcctggaagaaaacaaggaattggaaaatgctttgaaaaatatccagctgcctaaagaggaaattaagaaacttgaagtagatgaaattactttatggtacaagatgattcttcctcctcaatttgacagatcaaagaagtatcccttgctaattcaagtgtatggtggtccctgcagtcagagtgtaaggtctgtatttgctgttaattggatatcttatcttgcaagtaaggaagggatggtcattgccttggtggatggtcgaggaacagctttccaaggtgacaaactcctctatgcagtgtatcgaaagctgggtgtttatgaagttgaagaccagattacagctgtcagaaaattcatagaaatgggtttcattgatgaaaaaagaatagccatatggggctggtcctatggaggatacgtttcatcactggcccttgcatctggaactggtcttttcaaatgtggtatagcagtggctccagtctccagctgggaatattacgcgtctgtctacacagagagattcatgggtctcccaacaaaggatgataatcttgagcactataagaattcaactgtgatggcaagagcagaatatttcagaaatgtagactatcttctcatccacggaacagcagatgataatgtgcactttcaaaactcagcacagattgctaaagctctggttaatgcacaagtggatttccaggcaatgtggtactctgaccagaaccacggcttatccggcctgtccacgaaccacttatacacccacatgacccacttcctaaagcagtgtttctctttgtcagactaa

SEQ ID NO: 1150 - protein, 760 aa, Artificial Sequence
  FAP alpha
MKTWVKIVFGVATSAVLALLVMCIVLRPSRVHNSEENTMRALTLKDILNGTFSYKTFFPNWISGQEYLHQSADNNIVLYNIETGQSYTILSNRTMKSVNASNYGLSPDRQFVYLESDYSKLWRYSYTATYYIYDLSNGEFVRGNELPRPIQYLCWSPVGSKLAYVYQNNIYLKQRPGDPPFQITFNGRENKIFNGIPDWVYEEEMLATKYALWWSPNGKFLAYAEFNDTDIPVIAYSYYGDEQYPRTINIPYPKAGAKNPVVRIFIIDTTYPAYVGPQEVPVPAMIASSDYYFSWLTWVTDERVCLQWLKRVQNVSVLSICDFREDWQTWDCPKTQEHIEESRTGWAGGFFVSTPVFSYDAISYYKIFSDKDGYKHIHYIKDTVENAIQITSGKWEAINIFRVTQDSLFYSSNEFEEYPGRRNIYRISIGSYPPSKKCVTCHLRKERCQYYTASFSDYAKYYALVCYGPGIPISTLHDGRTDQEIKILEENKELENALKNIQLPKEEIKKLEVDEITLWYKMILPPQFDRSKKYPLLIQVYGGPCSQSVRSVFAVNWISYLASKEGMVIALVDGRGTAFQGDKLLYAVYRKLGVYEVEDQITAVRKFIEMGFIDEKRIAIWGWSYGGYVSSLALASGTGLFKCGIAVAPVSSWEYYASVYTERFMGLPTKDDNLEHYKNSTVMARAEYFRNVDYLLIHGTADDNVHFQNSAQIAKALVNAQVDFQAMWYSDQNHGLSGLSTNHLYTHMTHFLKQCFSLSD

SEQ ID NO: 1151 - DNA, 2283 bp, Macaca fascicularis
atgaagacttgggtaaaaatcgtatttggagttgccacctctgctgtgcttgccttattggtgatgtgcattgtcttacgccctccaagagttcataactctgaagaaaatacaatgagagcactcacactgaaggatattttaaatgggacattttcttataaaacattttttccaaactggatttcaggacaagaatatcttcatcaatctgcagataacaatatagtactttataatattgaaacaggacaatcatataccattttgagtaacagaaccatgaaaagtgtgaatgcttcaaattatggcttatcacctgatcggcaatttgtatatctagaaagtgattattcaaagctttggagatactcttacacagcaacatattacatctatgaccttagcaatggagaatttgtaagaggaaatgagcttcctcgtccaattcagtatttatgctggtcgcctgttgggagtaaattagcatatgtctatcaaaacaatatctatttgaaacaaagaccaggagatccaccttttcaaataacatttaatggaagagaaaataaaatatttaatggaatcccagactgggtttatgaagaggaaatgcttgctacaaaatatgctctctggtggtctcctaatggaaaatttttggcatatgcggaatttaatgatacagatataccagttattgcctattcctattatggcgatgaacaatatcccagaacaataaatattccatacccaaaggcyggagctaagaatccttttgttcggatatttattatcgataccacttaccctgcgtatgtaggtccccaggaagtgcctgttccagcaatgatagcctcaagtgattattatttcagttggctcacgtgggttactgatgaacgagtatgtttgcagtggctaaaaagagtccagaatgtttcggtcttgtctatatgtgatttcagggaagactggcagacatgggattgtccaaagacccaggagcatatagaagaaagcagaactggatgggctggtggattctttgtttcaacaccagttttcagctatgatgccatttcatactacaaaatatttagtgacaaggatggctacaaacatattcactatatcaaagacactgtggaaaatgctattcaaattacaagtggcaagtgggaggccataaatatattcagagtaacacaggattcactgttttattctagcaatgaatttgaagattaccctggaagaagaaacatctacagaattagcattggaagctatcctccaagcaagaagtgtgttacttgccatctaaggaaagaaaggtgccaatattacacagcaagtttcagcgactacgccaagtactatgcacttgtctgctatggcccaggcatccccatttccacccttcatgacggacgcactgatcaagaaattaaaatcctggaagaaaacaaggaattggaaaatgctttgaaaaatatccagctgcctaaagaggaaattaagaaacttgaagtagatgaaattactttatggtacaagatgattcttcctcctcaatttgacagatcaaagaagtatcccttgctaattcaagtgtatggtggtccctgcagtcagagtgtraggtctgtatttgctgttaattggatatcktatcttgcaagtaaggaagggatggtcattgccttggtggatggtcgaggaacagctttccaaggtgacaaactcctgtatgcagtgtatcgaaagctgggtgtttatgaagttgaagaccagattacagctgtcagaaaattcatagaaatgggtttcattgatgaaaaaagaatagccatatggggctggtcctatggaggataygtttcatcactggcccttgcatctggaactggtcttttcaaatgtgggatagcagtggctccagtctccagctgggaatattacgcgtctgtctacacagaaagattcatgggtcttcccacaaaggatgataatcttgagcactacaaaaattcaactgtgatggcaagagcagaatatttcagaaatgtagactatcttctcatccacggaacagcagatgataatgtgcactttcaaaactcagcacagattgctaaagctctggttaatgcacaagtggatttccaggcaatgtggtactctgaccagaaccacggcttatccggcctgtccacgaaccacttatacacccacatgacccactttctaaagcagtgtttttctttgtcggactaa

SEQ ID NO: 1152 - protein, 760 aa, Macaca fascicularis
MKTWVKIVFGVATSAVLALLVMCIVLRPPRVHNSEENTMRALTLKDILNGTFSYKTFFPNWISGQEYLHQSADNNIVLYNIETGQSYTILSNRTMKSVNASNYGLSPDRQFVYLESDYSKLWRYSYTATYYIYDLSNGEFVRGNELPRPIQYLCWSPVGSKLAYVYQNNIYLKQRPGDPPFQITFNGRENKIFNGIPDWVYEEEMLATKYALWWSPNGKFLAYAEFNDTDIPVIAYSYYGDEQYPRTINIPYPKAGAKNPFVRIFIIDTTYPAYVGPQEVPVPAMIASSDYYFSWLTWVTDERVCLQWLKRVQNVSVLSICDFREDWQTWDCPKTQEHIEESRTGWAGGFFVSTPVFSYDAISYYKIFSDKDGYKHIHYIKDTVENAIQITSGKWEAINIFRVTQDSLFYSSNEFEDYPGRRNIYRISIGSYPPSKKCVTCHLRKERCQYYTASFSDYAKYYALVCYGPGIPISTLHDGRTDQEIKILEENKELENALKNIQLPKEEIKKLEVDEITLWYKMILPPQFDRSKKYPLLIQVYGGPCSQSVRSVFAVNWISYLASKEGMVIALVDGRGTAFQGDKLLYAVYRKLGVYEVEDQITAVRKFIEMGFIDEKRIAIWGWSYGGYVSSLALASGTGLFKCGIAVAPVSSWEYYASVYTERFMGLPTKDDNLEHYKNSTVMARAEYFRNVDYLLIHGTADDNVHFQNSAQIAKALVNAQVDFQAMWYSDQNHGLSGLSTNHLYTHMTHFLKQCFSLSD

SEQ ID NO: 1153 - DNA, 24 bp, Artificial Sequence
  forward primer
cagcttccaactacaaagacagac

SEQ ID NO: 1154 - DNA, 25 bp, Artificial Sequence
  reverse primer
tttcctcttcataaacccagtctgg

SEQ ID NO: 1155 - DNA, 26 bp, Artificial Sequence
  forward primer
ttgaaacaaagaccaggagatccacc

SEQ ID NO: 1156 - DNA, 25 bp, Artificial Sequence
  reverse primer
agatggcaagtaacacacttcttgc

SEQ ID NO: 1157 - DNA, 28 bp, Artificial Sequence
  forward primer
gaagaaacatctacagaattagcattgg

SEQ ID NO: 1158 - DNA, 28 bp, Artificial Sequence
  reverse primer
cacatttgaaaagaccagttccagatgc

SEQ ID NO: 1159 - DNA, 33 bp, Artificial Sequence
  forward primer
agattacagctgtcagaaaattcatagaaatgg

SEQ ID NO: 1160 - DNA, 29 bp, Artificial Sequence
  reverse primer
atataaggttttcagattctgatacaggc

SEQ ID NO: 1161 - DNA, 51 bp, Artificial Sequence
  5'FAP-VH-A-XhoI
ccgctactcgagtctggasctgagstgrwgaagcctggggcttcagtaaag

SEQ ID NO: 1162 - DNA, 75 bp, Artificial Sequence
  3'FAP-VH-B
ctgtctcacccagtgtatggtgtattcagtgaatgtgtatcyagaagycttgcaggacayctttactgaagcccc

SEQ ID NO: 1163 - DNA, 75 bp, Artificial Sequence
  5'FAP-VH-C
cactgggtgagacagkcccmtggamagagmcttgagtggatkggaggtattaatcctaacaatggtattcctaac

SEQ ID NO: 1164 - DNA, 78 bp, Artificial Sequence
  3'FAP-VH-D
catgtaggcggtgctggmggacktgyctmyagttawtgtgrccctgcccttgaacttctgattgtagttaggaatacc

SEQ ID NO: 1165 - DNA, 78 bp, Artificial Sequence
  5'FAP-VH-E
agcaccgcctacatggagctcmgcagcctgasatctgaggatactgcggtctattwctgtgcaagaagaagaatcgcc

SEQ ID NO: 1166 - DNA, 84 bp, Artificial Sequence
  3'FAP-VH-F-BstEII
ccagtaggtgaccagggttccttgaccccagtagtccatagcatggccctcgtcgtaaccataggcgattcttcttcttgcaca

SEQ ID NO: 1167 - DNA, 87 bp, Artificial Sequence
  5'FAP-VL-A-SacI
cgacctgagctcgtgatgacacagactccayyctccctasctgtgacasytggagagmmggyttctatsagctgcaagtccagtcag

SEQ ID NO: 1168 - DNA, 84 bp, Artificial Sequence
  3'FAP-VL-B
agactgccctggcttctgcwggwaccaggccaagtagttcttttgattacgactatataaaaggctctgactggacttgcagct

SEQ ID NO: 1169 - DNA, 87 bp, Artificial Sequence
  5'FAP-VL-C
cagaagccagggcagtctcctmaactgctgatttwctgggcatccactagggaatctggggtccctgatcgcttctcaggcagtgga

SEQ ID NO: 1170 - DNA, 90 bp, Artificial Sequence
  3'FAP-VL-D
atattgctgacagtmataaactsccasgtcctcagcctscacwctgctgatcktgagaktgaaatccgtcccaratccactgcctgagaa

SEQ ID NO: 1171 - DNA, 80 bp, Artificial Sequence
  3'FAP-VL-E-BsiWI/SpeI
ccagtaactagtcgtacgtttgatctccaccttggtcccaccaccgaacgtgagcggatagctaaaatattgctgacagt

SEQ ID NO: 1172 - protein, 117 aa, Artificial Sequence
  PC32B8-H
EVQLVQSGAEVKKPGATVKISCKVSGYTFTNYWLNWVKQAPGRGLEWIGRIDPSDSEIHYDQKFKDRVTITADKSTNTAYIELSSLRSEDTAVYYCALTGIYAMAYWGQGTTVTVSS

SEQ ID NO: 1173 - protein, 5 aa, Artificial Sequence
  PC32B8-HCDR1
NYWLN

SEQ ID NO: 1174 - protein, 17 aa, Artificial Sequence
  PC32B8-HCDR2
RIDPSDSEIHYDQKFKD

SEQ ID NO: 1175 - protein, 8 aa, Artificial Sequence
  PC32B8-HCDR3
TGIYAMAY

SEQ ID NO: 1176 - DNA, 351 bp, Artificial Sequence
  PC32B8-H
gaggtgcagctggtccagtcaggcgccgaagtgaagaagcctggcgccacagtgaagatatcctgcaaggtcagcggctacaccttcaccaactactggctgaactgggtgaaacaggcgcccggcaggggcctggaatggataggcaggatcgaccccagcgacagcgagatccactacgaccagaagttcaaggacagagtcaccataaccgcggacaagagcaccaacaccgcctacatcgagctgtccagcctgagaagcgaggacaccgccgtgtactattgcgccctgaccggcatctacgccatggcctactggggccagggcaccacggtcaccgtctcctca

SEQ ID NO: 1177 - protein, 112 aa, Artificial Sequence
  PC32B8-L
DIVMTQSPPSLPVTPGEPASISCRSSKSLLHSNGNTYLYWYLQKPGQSPQLLIYRMSNLASGVPDRFSGSGSGTDFTLKISRVEAEDVGVYYCLQHLEYPYTFGQGTKLEIK

SEQ ID NO: 1178 - protein, 16 aa, Artificial Sequence
  PC32B8-LCDR1
RSSKSLLHSNGNTYLY

SEQ ID NO: 1179 - protein, 7 aa, Artificial Sequence
  PC32B8-LCDR2
RMSNLAS

SEQ ID NO: 1180 - protein, 9 aa, Artificial Sequence
  PC32B8-LCDR3
LQHLEYPYT

SEQ ID NO: 1181 - DNA, 336 bp, Artificial Sequence
  PC32B8-L
gacatcgtgatgacccagtcacctccaagcctgccagtgaccccaggcgagccagcgtccatcagctgcaggtccagcaagagcctgctgcacagcaacggcaacacctacctgtactggtatctgcagaagccaggccagagcccccagctgctgatctacaggatgagcaacctggctagcggcgtgccagacagattcagcggcagcggctctggaaccgacttcaccctgaagatcagcagggtggaggccgaggacgtgggcgtgtactactgcctgcagcacctggaatacccctacaccttcggccaagggaccaagctggaaatcaag

SEQ ID NO: 1182 - protein, 244 aa, Artificial Sequence
  PC32B8-HL
EVQLVQSGAEVKKPGATVKISCKVSGYTFTNYWLNWVKQAPGRGLEWIGRIDPSDSEIHYDQKFKDRVTITADKSTNTAYIELSSLRSEDTAVYYCALTGIYAMAYWGQGTTVTVSSGGGGSGGGGSGGGGSDIVMTQSPPSLPVTPGEPASISCRSSKSLLHSNGNTYLYWYLQKPGQSPQLLIYRMSNLASGVPDRFSGSGSGTDFTLKISRVEAEDVGVYYCLQHLEYPYTFGQGTKLEIK

SEQ ID NO: 1183 - DNA, 732 bp, Artificial Sequence
  PC32B8-HL
gaggtgcagctggtccagtcaggcgccgaagtgaagaagcctggcgccacagtgaagatatcctgcaaggtcagcggctacaccttcaccaactactggctgaactgggtgaaacaggcgcccggcaggggcctggaatggataggcaggatcgaccccagcgacagcgagatccactacgaccagaagttcaaggacagagtcaccataaccgcggacaagagcaccaacaccgcctacatcgagctgtccagcctgagaagcgaggacaccgccgtgtactattgcgccctgaccggcatctacgccatggcctactggggccagggcaccacggtcaccgtctcctcaggtggtggtggttctggcggcggcggctccggtggtggtggttctgacatcgtgatgacccagtcacctccaagcctgccagtgaccccaggcgagccagcgtccatcagctgcaggtccagcaagagcctgctgcacagcaacggcaacacctacctgtactggtatctgcagaagccaggccagagcccccagctgctgatctacaggatgagcaacctggctagcggcgtgccagacagattcagcggcagcggctctggaaccgacttcaccctgaagatcagcagggtggaggccgaggacgtgggcgtgtactactgcctgcagcacctggaatacccctacaccttcggccaagggaccaagctggaaatcaag

SEQ ID NO: 1184 - protein, 499 aa, Artificial Sequence
  PC32B8 HL x I2C HL
EVQLVQSGAEVKKPGATVKISCKVSGYTFTNYWLNWVKQAPGRGLEWIGRIDPSDSEIHYDQKFKDRVTITADKSTNTAYIELSSLRSEDTAVYYCALTGIYAMAYWGQGTTVTVSSGGGGSGGGGSGGGGSDIVMTQSPPSLPVTPGEPASISCRSSKSLLHSNGNTYLYWYLQKPGQSPQLLIYRMSNLASGVPDRFSGSGSGTDFTLKISRVEAEDVGVYYCLQHLEYPYTFGQGTKLEIKSGGGGSEVQLVESGGGLVQPGGSLKLSCAASGFTFNKYAMNWVRQAPGKGLEWVARIRSKYNNYATYYADSVKDRFTISRDDSKNTAYLQMNNLKTEDTAVYYCVRHGNFGNSYISYWAYWGQGTLVTVSSGGGGSGGGGSGGGGSQTVVTQEPSLTVSPGGTVTLTCGSSTGAVTSGNYPNWVQQKPGQAPRGLIGGTKFLAPGTPARFSGSLLGGKAALTLSGVQPEDEAEYYCVLWYSNRWVFGGGTKLTVL

SEQ ID NO: 1185 - DNA, 1497 bp, Artificial Sequence
  PC32B8 HL x I2C HL
gaggtgcagctggtccagtcaggcgccgaagtgaagaagcctggcgccacagtgaagatatcctgcaaggtcagcggctacaccttcaccaactactggctgaactgggtgaaacaggcgcccggcaggggcctggaatggataggcaggatcgaccccagcgacagcgagatccactacgaccagaagttcaaggacagagtcaccataaccgcggacaagagcaccaacaccgcctacatcgagctgtccagcctgagaagcgaggacaccgccgtgtactattgcgccctgaccggcatctacgccatggcctactggggccagggcaccacggtcaccgtctcctcaggtggtggtggttctggcggcggcggctccggtggtggtggttctgacatcgtgatgacccagtcacctccaagcctgccagtgaccccaggcgagccagcgtccatcagctgcaggtccagcaagagcctgctgcacagcaacggcaacacctacctgtactggtatctgcagaagccaggccagagcccccagctgctgatctacaggatgagcaacctggctagcggcgtgccagacagattcagcggcagcggctctggaaccgacttcaccctgaagatcagcagggtggaggccgaggacgtgggcgtgtactactgcctgcagcacctggaatacccctacaccttcggccaagggaccaagctggaaatcaagtccggaggtggtggatccgaggtgcagctggtcgagtctggaggaggattggtgcagcctggagggtcattgaaactctcatgtgcagcctctggattcaccttcaataagtacgccatgaactgggtccgccaggctccaggaaagggtttggaatgggttgctcgcataagaagtaaatataataattatgcaacatattatgccgattcagtgaaagacaggttcaccatctccagagatgattcaaaaaacactgcctatctacaaatgaacaacttgaaaactgaggacactgccgtgtactactgtgtgagacatgggaacttcggtaatagctacatatcctactgggcttactggggccaagggactctggtcaccgtctcctcaggtggtggtggttctggcggcggcggctccggtggtggtggttctcagactgttgtgactcaggaaccttcactcaccgtatcacctggtggaacagtcacactcacttgtggctcctcgactggggctgttacatctggcaactacccaaactgggtccaacaaaaaccaggtcaggcaccccgtggtctaataggtgggactaagttcctcgcccccggtactcctgccagattctcaggctccctgcttggaggcaaggctgccctcaccctctcaggggtacagccagaggatgaggcagaatattactgtgttctatggtacagcaaccgctgggtgttcggtggaggaaccaaactgactgtccta

SEQ ID NO: 1186 - protein, 117 aa, Artificial Sequence
  PC32D5-H
EVQLVQSGAEVVKPGATVKISCKVSGYTFTNYWLNWVKQAPGRGLEWIGRIDPSDSEIHYDQKFKDRVTITADKSTSTAYMELSSLRSEDTAVYYCALTGIYAMAYWGQGTTVTVSS

SEQ ID NO: 1187 - protein, 5 aa, Artificial Sequence
  PC32D5-HCDR1
NYWLN

SEQ ID NO: 1188 - protein, 17 aa, Artificial Sequence
  PC32D5-HCDR2
RIDPSDSEIHYDQKFKD

SEQ ID NO: 1189 - protein, 8 aa, Artificial Sequence
  PC32D5-HCDR3
TGIYAMAY

SEQ ID NO: 1190 - DNA, 351 bp, Artificial Sequence
  PC32D5-H
gaggtgcagctggtccagtcaggcgccgaagtggtgaagcctggcgccacagtgaagatatcctgcaaggtcagcggctacaccttcaccaactactggctgaactgggtgaaacaggcgcccggcaggggcctggaatggataggcaggatcgaccccagcgacagcgagatccactacgaccagaagttcaaggacagagtcaccataaccgcggacaagagcaccagcaccgcctacatggagctgtccagcctgagaagcgaggacaccgccgtgtactattgcgccctgaccggcatctacgccatggcctactggggccagggcaccacggtcaccgtctcctca

SEQ ID NO: 1191 - protein, 112 aa, Artificial Sequence
  PC32D5-L
DIVMTQSPLSLPVTPGESASISCRSSKSLLHSNGNTYLYWYLQKPGQSPQLLIYRMSNLASGVPDRFSGSGSGTDFTLRISRVEAEDVGVYYCLQHLEYPYTFGQGTKLEIK

SEQ ID NO: 1192 - protein, 16 aa, Artificial Sequence
  PC32D5-LCDR1
RSSKSLLHSNGNTYLY

SEQ ID NO: 1193 - protein, 7 aa, Artificial Sequence
  PC32D5-LCDR2
RMSNLAS

SEQ ID NO: 1194 - protein, 9 aa, Artificial Sequence
  PC32D5-LCDR3
LQHLEYPYT

SEQ ID NO: 1195 - DNA, 336 bp, Artificial Sequence
  PC32D5-L
gacatcgtgatgacccagtcacctctaagcctgccagtgaccccaggcgagtcagcgtccatcagctgcaggtccagcaagagcctgctgcacagcaacggcaacacctacctgtactggtatctgcagaagccaggccagagcccccagctgctgatctacaggatgagcaacctggctagcggcgtgccagacagattcagcggcagcggctctggaaccgacttcaccctgaggatcagcagggtggaggccgaggacgtgggcgtgtactactgcctgcagcacctggaatacccctacaccttcggccaagggaccaagctggaaatcaag

SEQ ID NO: 1196 - protein, 244 aa, Artificial Sequence
  PC32D5-HL
EVQLVQSGAEVVKPGATVKISCKVSGYTFTNYWLNWVKQAPGRGLEWIGRIDPSDSEIHYDQKFKDRVTITADKSTSTAYMELSSLRSEDTAVYYCALTGIYAMAYWGQGTTVTVSSGGGGSGGGGSGGGGSDIVMTQSPLSLPVTPGESASISCRSSKSLLHSNGNTYLYWYLQKPGQSPQLLIYRMSNLASGVPDRFSGSGSGTDFTLRISRVEAEDVGVYYCLQHLEYPYTFGQGTKLEIK

SEQ ID NO: 1197 - DNA, 732 bp, Artificial Sequence
  PC32D5-HL
gaggtgcagctggtccagtcaggcgccgaagtggtgaagcctggcgccacagtgaagatatcctgcaaggtcagcggctacaccttcaccaactactggctgaactgggtgaaacaggcgcccggcaggggcctggaatggataggcaggatcgaccccagcgacagcgagatccactacgaccagaagttcaaggacagagtcaccataaccgcggacaagagcaccagcaccgcctacatggagctgtccagcctgagaagcgaggacaccgccgtgtactattgcgccctgaccggcatctacgccatggcctactggggccagggcaccacggtcaccgtctcctcaggtggtggtggttctggcggcggcggctccggtggtggtggttctgacatcgtgatgacccagtcacctctaagcctgccagtgaccccaggcgagtcagcgtccatcagctgcaggtccagcaagagcctgctgcacagcaacggcaacacctacctgtactggtatctgcagaagccaggccagagcccccagctgctgatctacaggatgagcaacctggctagcggcgtgccagacagattcagcggcagcggctctggaaccgacttcaccctgaggatcagcagggtggaggccgaggacgtgggcgtgtactactgcctgcagcacctggaatacccctacaccttcggccaagggaccaagctggaaatcaag

SEQ ID NO: 1198 - protein, 499 aa, Artificial Sequence
  PC32D5 HL x I2C HL
EVQLVQSGAEVVKPGATVKISCKVSGYTFTNYWLNWVKQAPGRGLEWIGRIDPSDSEIHYDQKFKDRVTITADKSTSTAYMELSSLRSEDTAVYYCALTGIYAMAYWGQGTTVTVSSGGGGSGGGGSGGGGSDIVMTQSPLSLPVTPGESASISCRSSKSLLHSNGNTYLYWYLQKPGQSPQLLIYRMSNLASGVPDRFSGSGSGTDFTLRISRVEAEDVGVYYCLQHLEYPYTFGQGTKLEIKSGGGGSEVQLVESGGGLVQPGGSLKLSCAASGFTFNKYAMNWVRQAPGKGLEWVARIRSKYNNYATYYADSVKDRFTISRDDSKNTAYLQMNNLKTEDTAVYYCVRHGNFGNSYISYWAYWGQGTLVTVSSGGGGSGGGGSGGGGSQTVVTQEPSLTVSPGGTVTLTCGSSTGAVTSGNYPNWVQQKPGQAPRGLIGGTKFLAPGTPARFSGSLLGGKAALTLSGVQPEDEAEYYCVLWYSNRWVFGGGTKLTVL

SEQ ID NO: 1199 - DNA, 1497 bp, Artificial Sequence
  PC32D5 HL x I2C HL
gaggtgcagctggtccagtcaggcgccgaagtggtgaagcctggcgccacagtgaagatatcctgcaaggtcagcggctacaccttcaccaactactggctgaactgggtgaaacaggcgcccggcaggggcctggaatggataggcaggatcgaccccagcgacagcgagatccactacgaccagaagttcaaggacagagtcaccataaccgcggacaagagcaccagcaccgcctacatggagctgtccagcctgagaagcgaggacaccgccgtgtactattgcgccctgaccggcatctacgccatggcctactggggccagggcaccacggtcaccgtctcctcaggtggtggtggttctggcggcggcggctccggtggtggtggttctgacatcgtgatgacccagtcacctctaagcctgccagtgaccccaggcgagtcagcgtccatcagctgcaggtccagcaagagcctgctgcacagcaacggcaacacctacctgtactggtatctgcagaagccaggccagagcccccagctgctgatctacaggatgagcaacctggctagcggcgtgccagacagattcagcggcagcggctctggaaccgacttcaccctgaggatcagcagggtggaggccgaggacgtgggcgtgtactactgcctgcagcacctggaatacccctacaccttcggccaagggaccaagctggaaatcaagtccggaggtggtggatccgaggtgcagctggtcgagtctggaggaggattggtgcagcctggagggtcattgaaactctcatgtgcagcctctggattcaccttcaataagtacgccatgaactgggtccgccaggctccaggaaagggtttggaatgggttgctcgcataagaagtaaatataataattatgcaacatattatgccgattcagtgaaagacaggttcaccatctccagagatgattcaaaaaacactgcctatctacaaatgaacaacttgaaaactgaggacactgccgtgtactactgtgtgagacatgggaacttcggtaatagctacatatcctactgggcttactggggccaagggactctggtcaccgtctcctcaggtggtggtggttctggcggcggcggctccggtggtggtggttctcagactgttgtgactcaggaaccttcactcaccgtatcacctggtggaacagtcacactcacttgtggctcctcgactggggctgttacatctggcaactacccaaactgggtccaacaaaaaccaggtcaggcaccccgtggtctaataggtgggactaagttcctcgcccccggtactcctgccagattctcaggctccctgcttggaggcaaggctgccctcaccctctcaggggtacagccagaggatgaggcagaatattactgtgttctatggtacagcaaccgctgggtgttcggtggaggaaccaaactgactgtccta

SEQ ID NO: 1200 - protein, 117 aa, Artificial Sequence
  PC17D10-H
EVQLVQSGAEVKKPGATVKISCKVSGYTFTNYWLNWVKQTPGKGLEWIGRIDPSDSEIHYDQKFKDKVTITADKSTSTAYMELSSLRSEDTAVYYCALTGIYAMAYWGQGTTVTVSS

SEQ ID NO: 1201 - protein, 5 aa, Artificial Sequence
  PC17D10-HCDR1
NYWLN

SEQ ID NO: 1202 - protein, 17 aa, Artificial Sequence
  PC17D10-HCDR2
RIDPSDSEIHYDQKFKD

SEQ ID NO: 1203 - protein, 8 aa, Artificial Sequence
  PC17D10-HCDR3
TGIYAMAY

SEQ ID NO: 1204 - DNA, 351 bp, Artificial Sequence
  PC17D10-H
gaggtgcagctggtccagtcaggcgccgaagtgaagaagcctggcgccacagtgaagatatcctgcaaggtcagcggctacaccttcaccaactactggctgaactgggtgaaacagacgcccggcaagggcctggaatggataggcaggatcgaccccagcgacagcgagatccactacgaccagaagttcaaggacaaagtcaccataaccgcggacaagagcaccagcaccgcctacatggagctgtccagcctgagaagcgaggacaccgccgtgtactattgcgccctgaccggcatctacgccatggcctactggggccagggcaccacggtcaccgtctcctca

SEQ ID NO: 1205 - protein, 112 aa, Artificial Sequence
  PC17D10-L
DIVMTQAPLSLPVTPGEPVSISCRSSKSLLHSNGNTYLYWYLQKPGQSPQLLIYRMSNLASGVPDRFSGSGSGTDFTLRISRVEAEDVGVYYCLQHLEYPYTFGQGTKLEIK

SEQ ID NO: 1206 - protein, 16 aa, Artificial Sequence
  PC17D10-LCDR1
RSSKSLLHSNGNTYLY

SEQ ID NO: 1207 - protein, 7 aa, Artificial Sequence
  PC17D10-LCDR2
RMSNLAS

SEQ ID NO: 1208 - protein, 9 aa, Artificial Sequence
  PC17D10-LCDR3
LQHLEYPYT

SEQ ID NO: 1209 - DNA, 336 bp, Artificial Sequence
  PC17D10-L
gacatcgtgatgacccaggcacctctaagcctgccagtgaccccaggcgagccagtgtccatcagctgcaggtccagcaagagcctgctgcacagcaacggcaacacctacctgtactggtatctgcagaagccaggccagagcccccagctgctgatctacaggatgagcaacctggctagcggcgtgccagacagattcagcggcagcggctctggaaccgacttcaccctgaggatcagcagggtggaggccgaggacgtgggcgtgtactactgcctgcagcacctggaatacccctacaccttcggccaagggaccaagctggaaatcaag

SEQ ID NO: 1210 - protein, 244 aa, Artificial Sequence
  PC17D10-HL
EVQLVQSGAEVKKPGATVKISCKVSGYTFTNYWLNWVKQTPGKGLEWIGRIDPSDSEIHYDQKFKDKVTITADKSTSTAYMELSSLRSEDTAVYYCALTGIYAMAYWGQGTTVTVSSGGGGSGGGGSGGGGSDIVMTQAPLSLPVTPGEPVSISCRSSKSLLHSNGNTYLYWYLQKPGQSPQLLIYRMSNLASGVPDRFSGSGSGTDFTLRISRVEAEDVGVYYCLQHLEYPYTFGQGTKLEIK

SEQ ID NO: 1211 - DNA, 732 bp, Artificial Sequence
  PC17D10-HL
gaggtgcagctggtccagtcaggcgccgaagtgaagaagcctggcgccacagtgaagatatcctgcaaggtcagcggctacaccttcaccaactactggctgaactgggtgaaacagacgcccggcaagggcctggaatggataggcaggatcgaccccagcgacagcgagatccactacgaccagaagttcaaggacaaagtcaccataaccgcggacaagagcaccagcaccgcctacatggagctgtccagcctgagaagcgaggacaccgccgtgtactattgcgccctgaccggcatctacgccatggcctactggggccagggcaccacggtcaccgtctcctcaggtggtggtggttctggcggcggcggctccggtggtggtggttctgacatcgtgatgacccaggcacctctaagcctgccagtgaccccaggcgagccagtgtccatcagctgcaggtccagcaagagcctgctgcacagcaacggcaacacctacctgtactggtatctgcagaagccaggccagagcccccagctgctgatctacaggatgagcaacctggctagcggcgtgccagacagattcagcggcagcggctctggaaccgacttcaccctgaggatcagcagggtggaggccgaggacgtgggcgtgtactactgcctgcagcacctggaatacccctacaccttcggccaagggaccaagctggaaatcaag

SEQ ID NO: 1212 - protein, 499 aa, Artificial Sequence
  PC17D10 HL x I2C HL
EVQLVQSGAEVKKPGATVKISCKVSGYTFTNYWLNWVKQTPGKGLEWIGRIDPSDSEIHYDQKFKDKVTITADKSTSTAYMELSSLRSEDTAVYYCALTGIYAMAYWGQGTTVTVSSGGGGSGGGGSGGGGSDIVMTQAPLSLPVTPGEPVSISCRSSKSLLHSNGNTYLYWYLQKPGQSPQLLIYRMSNLASGVPDRFSGSGSGTDFTLRISRVEAEDVGVYYCLQHLEYPYTFGQGTKLEIKSGGGGSEVQLVESGGGLVQPGGSLKLSCAASGFTFNKYAMNWVRQAPGKGLEWVARIRSKYNNYATYYADSVKDRFTISRDDSKNTAYLQMNNLKTEDTAVYYCVRHGNFGNSYISYWAYWGQGTLVTVSSGGGGSGGGGSGGGGSQTVVTQEPSLTVSPGGTVTLTCGSSTGAVTSGNYPNWVQQKPGQAPRGLIGGTKFLAPGTPARFSGSLLGGKAALTLSGVQPEDEAEYYCVLWYSNRWVFGGGTKLTVL

SEQ ID NO: 1213 - DNA, 1497 bp, Artificial Sequence
  PC17D10 HL x I2C HL
gaggtgcagctggtccagtcaggcgccgaagtgaagaagcctggcgccacagtgaagatatcctgcaaggtcagcggctacaccttcaccaactactggctgaactgggtgaaacagacgcccggcaagggcctggaatggataggcaggatcgaccccagcgacagcgagatccactacgaccagaagttcaaggacaaagtcaccataaccgcggacaagagcaccagcaccgcctacatggagctgtccagcctgagaagcgaggacaccgccgtgtactattgcgccctgaccggcatctacgccatggcctactggggccagggcaccacggtcaccgtctcctcaggtggtggtggttctggcggcggcggctccggtggtggtggttctgacatcgtgatgacccaggcacctctaagcctgccagtgaccccaggcgagccagtgtccatcagctgcaggtccagcaagagcctgctgcacagcaacggcaacacctacctgtactggtatctgcagaagccaggccagagcccccagctgctgatctacaggatgagcaacctggctagcggcgtgccagacagattcagcggcagcggctctggaaccgacttcaccctgaggatcagcagggtggaggccgaggacgtgggcgtgtactactgcctgcagcacctggaatacccctacaccttcggccaagggaccaagctggaaatcaagtccggaggtggtggatccgaggtgcagctggtcgagtctggaggaggattggtgcagcctggagggtcattgaaactctcatgtgcagcctctggattcaccttcaataagtacgccatgaactgggtccgccaggctccaggaaagggtttggaatgggttgctcgcataagaagtaaatataataattatgcaacatattatgccgattcagtgaaagacaggttcaccatctccagagatgattcaaaaaacactgcctatctacaaatgaacaacttgaaaactgaggacactgccgtgtactactgtgtgagacatgggaacttcggtaatagctacatatcctactgggcttactggggccaagggactctggtcaccgtctcctcaggtggtggtggttctggcggcggcggctccggtggtggtggttctcagactgttgtgactcaggaaccttcactcaccgtatcacctggtggaacagtcacactcacttgtggctcctcgactggggctgttacatctggcaactacccaaactgggtccaacaaaaaccaggtcaggcaccccgtggtctaataggtgggactaagttcctcgcccccggtactcctgccagattctcaggctccctgcttggaggcaaggctgccctcaccctctcaggggtacagccagaggatgaggcagaatattactgtgttctatggtacagcaaccgctgggtgttcggtggaggaaccaaactgactgtccta

SEQ ID NO: 1214 - protein, 117 aa, Artificial Sequence
  PC16E12-H
EVQLVQSGAEVKKPGAPVKISCKVSGYTFTNYWLNWVKQRPGKGLEWIGRIDPSDSEIHYDQKFKDRVTITVDKSTSTAYIELSSLRSEDTAVYYCALTGIYAMAYWGQGTTVTVSS

SEQ ID NO: 1215 - protein, 5 aa, Artificial Sequence
  PC16E12-HCDR1
NYWLN

SEQ ID NO: 1216 - protein, 17 aa, Artificial Sequence
  PC16E12-HCDR2
RIDPSDSEIHYDQKFKD

SEQ ID NO: 1217 - protein, 8 aa, Artificial Sequence
  PC16E12-HCDR3
TGIYAMAY

SEQ ID NO: 1218 - DNA, 351 bp, Artificial Sequence
  PC16E12-H
gaggtgcagctggtccagtcaggcgccgaagtgaagaagcctggcgccccagtgaagatatcctgcaaggtcagcggctacaccttcaccaactactggctgaactgggtgaaacagaggcccggcaagggcctggaatggataggtaggatcgaccccagcgacagcgagatccactacgaccagaagttcaaggacagagtcaccataaccgtggacaagagcaccagcaccgcctacatcgagctgtccagcctgagaagcgaggacaccgccgtgtactattgcgccctgaccggcatctacgccatggcctactggggccagggcaccacggtcaccgtctcctca

SEQ ID NO: 1219 - protein, 112 aa, Artificial Sequence
  PC16E12-L
DIVMTQSPLSLPVTPGEPVSISCRSSKSLLHSNGNTYLYWYLQKPGQSPQLLIYRMSNLASGVPDRFSGSGSGTDFTLKISRVEAEDVGVYYCLQHLEYPYTFGQGTKLEIK

SEQ ID NO: 1220 - protein, 16 aa, Artificial Sequence
  PC16E12-LCDR1
RSSKSLLHSNGNTYLY

SEQ ID NO: 1221 - protein, 7 aa, Artificial Sequence
  PC16E12-LCDR2
RMSNLAS

SEQ ID NO: 1222 - protein, 9 aa, Artificial Sequence
  PC16E12-LCDR3
LQHLEYPYT

SEQ ID NO: 1223 - DNA, 336 bp, Artificial Sequence
  PC16E12-L
gacatcgtgatgacccagtcacctctaagcctgccagtgaccccaggcgagccagtgtccatcagctgcaggtccagcaagagcctgctgcacagcaacggcaacacctacctgtactggtatctgcagaagccaggccagagcccccagctgctgatctacaggatgagcaacctggctagcggcgtgccagacagattcagcggcagcggctctggaaccgacttcaccctgaagatcagcagggtggaggccgaggacgtgggcgtgtactactgcctgcagcacctggaatacccctacaccttcggccaagggaccaagctggaaatcaag

SEQ ID NO: 1224 - protein, 244 aa, Artificial Sequence
  PC16E12-HL
EVQLVQSGAEVKKPGAPVKISCKVSGYTFTNYWLNWVKQRPGKGLEWIGRIDPSDSEIHYDQKFKDRVTITVDKSTSTAYIELSSLRSEDTAVYYCALTGIYAMAYWGQGTTVTVSSGGGGSGGGGSGGGGSDIVMTQSPLSLPVTPGEPVSISCRSSKSLLHSNGNTYLYWYLQKPGQSPQLLIYRMSNLASGVPDRFSGSGSGTDFTLKISRVEAEDVGVYYCLQHLEYPYTFGQGTKLEIK

SEQ ID NO: 1225 - DNA, 732 bp, Artificial Sequence
  PC16E12-HL
gaggtgcagctggtccagtcaggcgccgaagtgaagaagcctggcgccccagtgaagatatcctgcaaggtcagcggctacaccttcaccaactactggctgaactgggtgaaacagaggcccggcaagggcctggaatggataggtaggatcgaccccagcgacagcgagatccactacgaccagaagttcaaggacagagtcaccataaccgtggacaagagcaccagcaccgcctacatcgagctgtccagcctgagaagcgaggacaccgccgtgtactattgcgccctgaccggcatctacgccatggcctactggggccagggcaccacggtcaccgtctcctcaggtggtggtggttctggcggcggcggctccggtggtggtggttctgacatcgtgatgacccagtcacctctaagcctgccagtgaccccaggcgagccagtgtccatcagctgcaggtccagcaagagcctgctgcacagcaacggcaacacctacctgtactggtatctgcagaagccaggccagagcccccagctgctgatctacaggatgagcaacctggctagcggcgtgccagacagattcagcggcagcggctctggaaccgacttcaccctgaagatcagcagggtggaggccgaggacgtgggcgtgtactactgcctgcagcacctggaatacccctacaccttcggccaagggaccaagctggaaatcaag

SEQ ID NO: 1226 - protein, 499 aa, Artificial Sequence
  PC16E12 HL x I2C HL
EVQLVQSGAEVKKPGAPVKISCKVSGYTFTNYWLNWVKQRPGKGLEWIGRIDPSDSEIHYDQKFKDRVTITVDKSTSTAYIELSSLRSEDTAVYYCALTGIYAMAYWGQGTTVTVSSGGGGSGGGGSGGGGSDIVMTQSPLSLPVTPGEPVSISCRSSKSLLHSNGNTYLYWYLQKPGQSPQLLIYRMSNLASGVPDRFSGSGSGTDFTLKISRVEAEDVGVYYCLQHLEYPYTFGQGTKLEIKSGGGGSEVQLVESGGGLVQPGGSLKLSCAASGFTFNKYAMNWVRQAPGKGLEWVARIRSKYNNYATYYADSVKDRFTISRDDSKNTAYLQMNNLKTEDTAVYYCVRHGNFGNSYISYWAYWGQGTLVTVSSGGGGSGGGGSGGGGSQTVVTQEPSLTVSPGGTVTLTCGSSTGAVTSGNYPNWVQQKPGQAPRGLIGGTKFLAPGTPARFSGSLLGGKAALTLSGVQPEDEAEYYCVLWYSNRWVFGGGTKLTVL

SEQ ID NO: 1227 - DNA, 1497 bp, Artificial Sequence
  PC16E12 HL x I2C HL
gaggtgcagctggtccagtcaggcgccgaagtgaagaagcctggcgccccagtgaagatatcctgcaaggtcagcggctacaccttcaccaactactggctgaactgggtgaaacagaggcccggcaagggcctggaatggataggtaggatcgaccccagcgacagcgagatccactacgaccagaagttcaaggacagagtcaccataaccgtggacaagagcaccagcaccgcctacatcgagctgtccagcctgagaagcgaggacaccgccgtgtactattgcgccctgaccggcatctacgccatggcctactggggccagggcaccacggtcaccgtctcctcaggtggtggtggttctggcggcggcggctccggtggtggtggttctgacatcgtgatgacccagtcacctctaagcctgccagtgaccccaggcgagccagtgtccatcagctgcaggtccagcaagagcctgctgcacagcaacggcaacacctacctgtactggtatctgcagaagccaggccagagcccccagctgctgatctacaggatgagcaacctggctagcggcgtgccagacagattcagcggcagcggctctggaaccgacttcaccctgaagatcagcagggtggaggccgaggacgtgggcgtgtactactgcctgcagcacctggaatacccctacaccttcggccaagggaccaagctggaaatcaagtccggaggtggtggatccgaggtgcagctggtcgagtctggaggaggattggtgcagcctggagggtcattgaaactctcatgtgcagcctctggattcaccttcaataagtacgccatgaactgggtccgccaggctccaggaaagggtttggaatgggttgctcgcataagaagtaaatataataattatgcaacatattatgccgattcagtgaaagacaggttcaccatctccagagatgattcaaaaaacactgcctatctacaaatgaacaacttgaaaactgaggacactgccgtgtactactgtgtgagacatgggaacttcggtaatagctacatatcctactgggcttactggggccaagggactctggtcaccgtctcctcaggtggtggtggttctggcggcggcggctccggtggtggtggttctcagactgttgtgactcaggaaccttcactcaccgtatcacctggtggaacagtcacactcacttgtggctcctcgactggggctgttacatctggcaactacccaaactgggtccaacaaaaaccaggtcaggcaccccgtggtctaataggtgggactaagttcctcgcccccggtactcctgccagattctcaggctccctgcttggaggcaaggctgccctcaccctctcaggggtacagccagaggatgaggcagaatattactgtgttctatggtacagcaaccgctgggtgttcggtggaggaaccaaactgactgtccta

SEQ ID NO: 1228 - protein, 117 aa, Artificial Sequence
  PC08F4-H
EVQLVQSGAEVKKPGATVKISCKVSGYTFTNYWLNWVQQRPGKGLEWIGRIDPSDSEIHYDQKFKDRVTLTADKSTSTAYMELSSLRSEDTAVYYCALTGIYAMAYWGQGTTVTVSS

SEQ ID NO: 1229 - protein, 5 aa, Artificial Sequence
  PC08F4-HCDR1
NYWLN

SEQ ID NO: 1230 - protein, 17 aa, Artificial Sequence
  PC08F4-HCDR2
RIDPSDSEIHYDQKFKD

SEQ ID NO: 1231 - protein, 8 aa, Artificial Sequence
  PC08F4-HCDR3
TGIYAMAY

SEQ ID NO: 1232 - DNA, 351 bp, Artificial Sequence
  PC08F4-H
gaggtgcagctggtccagtcaggcgccgaagtgaagaagcctggcgccacagtgaagatatcctgcaaggtcagcggctacaccttcaccaactactggctgaactgggtgcaacagaggcccggcaagggcctggaatggataggcaggatcgaccccagcgacagcgagatccactacgaccagaagttcaaggacagagtcaccctaaccgcggacaagagcaccagcaccgcctacatggagctgtccagcctgagaagcgaggacaccgccgtgtactattgcgccctgaccggcatctacgccatggcctactggggccagggcaccacggtcaccgtctcctca

SEQ ID NO: 1233 - protein, 112 aa, Artificial Sequence
  PC08F4-L
DIVMTQSPLSLPVTPGESASISCRSSKSLLHSNGNTYLYWYLQKPGQSPQLLIYRMSNLASGVPDRFSGSGSGTDFTLKISRVEAEDVGVYYCLQHLEYPYTFGQGTKLEIK

SEQ ID NO: 1234 - protein, 16 aa, Artificial Sequence
  PC08F4-LCDR1
RSSKSLLHSNGNTYLY

SEQ ID NO: 1235 - protein, 7 aa, Artificial Sequence
  PC08F4-LCDR2
RMSNLAS

SEQ ID NO: 1236 - protein, 9 aa, Artificial Sequence
  PC08F4-LCDR3
LQHLEYPYT

SEQ ID NO: 1237 - DNA, 336 bp, Artificial Sequence
  PC08F4-L
gacatcgtgatgacccagtcacctctaagcctgccagtgaccccaggcgagtcagcgtccatcagctgcaggtccagcaagagcctgctgcacagcaacggcaacacctacctgtactggtatctgcagaagccaggccagagcccccagctgctgatctacaggatgagcaacctggctagcggcgtgccagacagattcagcggcagcggctctggaaccgacttcaccctgaagatcagcagggtggaggccgaggacgtgggcgtgtactactgcctgcagcacctggaatacccctacaccttcggccaagggaccaagctggaaatcaag

SEQ ID NO: 1238 - protein, 244 aa, Artificial Sequence
  PC08F4-HL
EVQLVQSGAEVKKPGATVKISCKVSGYTFTNYWLNWVQQRPGKGLEWIGRIDPSDSEIHYDQKFKDRVTLTADKSTSTAYMELSSLRSEDTAVYYCALTGIYAMAYWGQGTTVTVSSGGGGSGGGGSGGGGSDIVMTQSPLSLPVTPGESASISCRSSKSLLHSNGNTYLYWYLQKPGQSPQLLIYRMSNLASGVPDRFSGSGSGTDFTLKISRVEAEDVGVYYCLQHLEYPYTFGQGTKLEIK

SEQ ID NO: 1239 - DNA, 732 bp, Artificial Sequence
  PC08F4-HL
gaggtgcagctggtccagtcaggcgccgaagtgaagaagcctggcgccacagtgaagatatcctgcaaggtcagcggctacaccttcaccaactactggctgaactgggtgcaacagaggcccggcaagggcctggaatggataggcaggatcgaccccagcgacagcgagatccactacgaccagaagttcaaggacagagtcaccctaaccgcggacaagagcaccagcaccgcctacatggagctgtccagcctgagaagcgaggacaccgccgtgtactattgcgccctgaccggcatctacgccatggcctactggggccagggcaccacggtcaccgtctcctcaggtggtggtggttctggcggcggcggctccggtggtggtggttctgacatcgtgatgacccagtcacctctaagcctgccagtgaccccaggcgagtcagcgtccatcagctgcaggtccagcaagagcctgctgcacagcaacggcaacacctacctgtactggtatctgcagaagccaggccagagcccccagctgctgatctacaggatgagcaacctggctagcggcgtgccagacagattcagcggcagcggctctggaaccgacttcaccctgaagatcagcagggtggaggccgaggacgtgggcgtgtactactgcctgcagcacctggaatacccctacaccttcggccaagggaccaagctggaaatcaag

SEQ ID NO: 1240 - protein, 499 aa, Artificial Sequence
  PC08F4 HL x I2C HL
EVQLVQSGAEVKKPGATVKISCKVSGYTFTNYWLNWVQQRPGKGLEWIGRIDPSDSEIHYDQKFKDRVTLTADKSTSTAYMELSSLRSEDTAVYYCALTGIYAMAYWGQGTTVTVSSGGGGSGGGGSGGGGSDIVMTQSPLSLPVTPGESASISCRSSKSLLHSNGNTYLYWYLQKPGQSPQLLIYRMSNLASGVPDRFSGSGSGTDFTLKISRVEAEDVGVYYCLQHLEYPYTFGQGTKLEIKSGGGGSEVQLVESGGGLVQPGGSLKLSCAASGFTFNKYAMNWVRQAPGKGLEWVARIRSKYNNYATYYADSVKDRFTISRDDSKNTAYLQMNNLKTEDTAVYYCVRHGNFGNSYISYWAYWGQGTLVTVSSGGGGSGGGGSGGGGSQTVVTQEPSLTVSPGGTVTLTCGSSTGAVTSGNYPNWVQQKPGQAPRGLIGGTKFLAPGTPARFSGSLLGGKAALTLSGVQPEDEAEYYCVLWYSNRWVFGGGTKLTVL

SEQ ID NO: 1241 - DNA, 1497 bp, Artificial Sequence
  PC08F4 HL x I2C HL
gaggtgcagctggtccagtcaggcgccgaagtgaagaagcctggcgccacagtgaagatatcctgcaaggtcagcggctacaccttcaccaactactggctgaactgggtgcaacagaggcccggcaagggcctggaatggataggcaggatcgaccccagcgacagcgagatccactacgaccagaagttcaaggacagagtcaccctaaccgcggacaagagcaccagcaccgcctacatggagctgtccagcctgagaagcgaggacaccgccgtgtactattgcgccctgaccggcatctacgccatggcctactggggccagggcaccacggtcaccgtctcctcaggtggtggtggttctggcggcggcggctccggtggtggtggttctgacatcgtgatgacccagtcacctctaagcctgccagtgaccccaggcgagtcagcgtccatcagctgcaggtccagcaagagcctgctgcacagcaacggcaacacctacctgtactggtatctgcagaagccaggccagagcccccagctgctgatctacaggatgagcaacctggctagcggcgtgccagacagattcagcggcagcggctctggaaccgacttcaccctgaagatcagcagggtggaggccgaggacgtgggcgtgtactactgcctgcagcacctggaatacccctacaccttcggccaagggaccaagctggaaatcaagtccggaggtggtggatccgaggtgcagctggtcgagtctggaggaggattggtgcagcctggagggtcattgaaactctcatgtgcagcctctggattcaccttcaataagtacgccatgaactgggtccgccaggctccaggaaagggtttggaatgggttgctcgcataagaagtaaatataataattatgcaacatattatgccgattcagtgaaagacaggttcaccatctccagagatgattcaaaaaacactgcctatctacaaatgaacaacttgaaaactgaggacactgccgtgtactactgtgtgagacatgggaacttcggtaatagctacatatcctactgggcttactggggccaagggactctggtcaccgtctcctcaggtggtggtggttctggcggcggcggctccggtggtggtggttctcagactgttgtgactcaggaaccttcactcaccgtatcacctggtggaacagtcacactcacttgtggctcctcgactggggctgttacatctggcaactacccaaactgggtccaacaaaaaccaggtcaggcaccccgtggtctaataggtgggactaagttcctcgcccccggtactcctgccagattctcaggctccctgcttggaggcaaggctgccctcaccctctcaggggtacagccagaggatgaggcagaatattactgtgttctatggtacagcaaccgctgggtgttcggtggaggaaccaaactgactgtccta

SEQ ID NO: 1242 - protein, 117 aa, Artificial Sequence
  PC17F5-H
EVQLVQSGAEVMKPGATVKISCKVSGYTFTNYWLNWVKQAPGKGLEWIGRIDPSDSEIHYDQKFKDRVTITANKSTSTAYMELSSLTSEDTAVYYCALTGIYAMAYWGQGTTVTVSS

SEQ ID NO: 1243 - protein, 5 aa, Artificial Sequence
  PC17F5-HCDR1
NYWLN

SEQ ID NO: 1244 - protein, 17 aa, Artificial Sequence
  PC17F5-HCDR2
RIDPSDSEIHYDQKFKD

SEQ ID NO: 1245 - protein, 8 aa, Artificial Sequence
  PC17F5-HCDR3
TGIYAMAY

SEQ ID NO: 1246 - DNA, 372 bp, Artificial Sequence
  PC17F5-H
caggtgcagctggtccagtcaggacctgaggtgatgaagcctggggcttcagtgaagatgtcctgcaaggcttctggatacacattcactgactatgttatacactgggtgaggcaggcacctggaaagcgccttgagtggatgggatatattaatccttatgatgatgatactacctacaaccagaagttcaagggccgggtcacaattactgtagacaaatccgccagcacagcctacatggaactcaacagcctgacatctgaggacactgcagtctattactgtgcaagaagggggaactcctatgatggttacttcgactattctatggactactggggtcaaggaaccttggtcaccgtctcctca

SEQ ID NO: 1247 - protein, 112 aa, Artificial Sequence; identical to SEQ ID NO: 1219
  PC17F5-L

SEQ ID NO: 1248 - protein, 16 aa, Artificial Sequence
  PC17F5-LCDR1
RSSKSLLHSNGNTYLY

SEQ ID NO: 1249 - protein, 7 aa, Artificial Sequence
  PC17F5-LCDR2
RMSNLAS

SEQ ID NO: 1250 - protein, 9 aa, Artificial Sequence
  PC17F5-LCDR3
LQHLEYPYT

SEQ ID NO: 1251 - protein, 324 aa, Artificial Sequence
  PC17F5-L
GACATCCAGCTGACCCAGTCTCCAAGCTTCATGTCCGCATCAGTAGGAGACAGAGTCACCATCACCTGCAGGGCCAGTCAGAATGTGGGTACTGCTGTAGCCTGGTATCAACAGAAACCAGGACAAGCCCCTAAATTACTGATTTACTCGGCATCGAATCGGTACACTGGAGTCCCTAGTCGCTTCTCAGGCAGTGGATCTGGGACAGAGTTCACTCTCACCATCAGCAGTCTGCAGTCTGAAGACTTCGCAACTTATTACTGCCAGCAATATACCAACTATCCCATGTATACGTTTGGACAGGGGACCAAGCTGGAAATAAAA

SEQ ID NO: 1252 - protein, 244 aa, Artificial Sequence
  PC17F5-HL
EVQLVQSGAEVMKPGATVKISCKVSGYTFTNYWLNWVKQAPGKGLEWIGRIDPSDSEIHYDQKFKDRVTITANKSTSTAYMELSSLTSEDTAVYYCALTGIYAMAYWGQGTTVTVSSGGGGSGGGGSGGGGSDIVMTQSPLSLPVTPGEPVSISCRSSKSLLHSNGNTYLYWYLQKPGQSPQLLIYRMSNLASGVPDRFSGSGSGTDFTLKISRVEAEDVGVYYCLQHLEYPYTFGQGTKLEIK

SEQ ID NO: 1253 - DNA, 732 bp, Artificial Sequence
  PC17F5-HL
gaggtgcagctggtccagtcaggcgccgaagtgatgaagcctggcgccacagtgaagatatcctgcaaggtcagcggctacaccttcaccaactactggctgaactgggtgaaacaggcgcccggcaagggcctggaatggataggcaggatcgaccccagcgacagcgagatccactacgaccagaagttcaaggacagagtcaccataaccgcgaacaagagcaccagcaccgcctacatggagctgtccagcctgacaagcgaggacaccgccgtgtactattgcgccctgaccggcatctacgccatggcctactggggccagggcaccacggtcaccgtctcctcaggtggtggtggttctggcggcggcggctccggtggtggtggttctgacatcgtgatgacccagtcacctctaagcctgccagtgaccccaggcgagccagtgtccatcagctgcaggtccagcaagagcctgctgcacagcaacggcaacacctacctgtactggtatctgcagaagccaggccagagcccccagctgctgatctacaggatgagcaacctggctagcggcgtgccagacagattcagcggcagcggctctggaaccgacttcaccctgaagatcagcagggtggaggccgaggacgtgggcgtgtactactgcctgcagcacctggaatacccctacaccttcggccaagggaccaagctggaaatcaag

SEQ ID NO: 1254 - protein, 499 aa, Artificial Sequence
  PC17F5 HL x I2C HL
EVQLVQSGAEVMKPGATVKISCKVSGYTFTNYWLNWVKQAPGKGLEWIGRIDPSDSEIHYDQKFKDRVTITANKSTSTAYMELSSLTSEDTAVYYCALTGIYAMAYWGQGTTVTVSSGGGGSGGGGSGGGGSDIVMTQSPLSLPVTPGEPVSISCRSSKSLLHSNGNTYLYWYLQKPGQSPQLLIYRMSNLASGVPDRFSGSGSGTDFTLKISRVEAEDVGVYYCLQHLEYPYTFGQGTKLEIKSGGGGSEVQLVESGGGLVQPGGSLKLSCAASGFTFNKYAMNWVRQAPGKGLEWVARIRSKYNNYATYYADSVKDRFTISRDDSKNTAYLQMNNLKTEDTAVYYCVRHGNFGNSYISYWAYWGQGTLVTVSSGGGGSGGGGSGGGGSQTVVTQEPSLTVSPGGTVTLTCGSSTGAVTSGNYPNWVQQKPGQAPRGLIGGTKFLAPGTPARFSGSLLGGKAALTLSGVQPEDEAEYYCVLWYSNRWVFGGGTKLTVL

SEQ ID NO: 1255 - DNA, 1497 bp, Artificial Sequence
  PC17F5 HL x I2C HL
gaggtgcagctggtccagtcaggcgccgaagtgatgaagcctggcgccacagtgaagatatcctgcaaggtcagcggctacaccttcaccaactactggctgaactgggtgaaacaggcgcccggcaagggcctggaatggataggcaggatcgaccccagcgacagcgagatccactacgaccagaagttcaaggacagagtcaccataaccgcgaacaagagcaccagcaccgcctacatggagctgtccagcctgacaagcgaggacaccgccgtgtactattgcgccctgaccggcatctacgccatggcctactggggccagggcaccacggtcaccgtctcctcaggtggtggtggttctggcggcggcggctccggtggtggtggttctgacatcgtgatgacccagtcacctctaagcctgccagtgaccccaggcgagccagtgtccatcagctgcaggtccagcaagagcctgctgcacagcaacggcaacacctacctgtactggtatctgcagaagccaggccagagcccccagctgctgatctacaggatgagcaacctggctagcggcgtgccagacagattcagcggcagcggctctggaaccgacttcaccctgaagatcagcagggtggaggccgaggacgtgggcgtgtactactgcctgcagcacctggaatacccctacaccttcggccaagggaccaagctggaaatcaagtccggaggtggtggatccgaggtgcagctggtcgagtctggaggaggattggtgcagcctggagggtcattgaaactctcatgtgcagcctctggattcaccttcaataagtacgccatgaactgggtccgccaggctccaggaaagggtttggaatgggttgctcgcataagaagtaaatataataattatgcaacatattatgccgattcagtgaaagacaggttcaccatctccagagatgattcaaaaaacactgcctatctacaaatgaacaacttgaaaactgaggacactgccgtgtactactgtgtgagacatgggaacttcggtaatagctacatatcctactgggcttactggggccaagggactctggtcaccgtctcctcaggtggtggtggttctggcggcggcggctccggtggtggtggttctcagactgttgtgactcaggaaccttcactcaccgtatcacctggtggaacagtcacactcacttgtggctcctcgactggggctgttacatctggcaactacccaaactgggtccaacaaaaaccaggtcaggcaccccgtggtctaataggtgggactaagttcctcgcccccggtactcctgccagattctcaggctccctgcttggaggcaaggctgccctcaccctctcaggggtacagccagaggatgaggcagaatattactgtgttctatggtacagcaaccgctgggtgttcggtggaggaaccaaactgactgtccta

SEQ ID NO: 1256 - protein, 117 aa, Artificial Sequence
  PC17H10-H
EVQLVQSGAEVKKPGATVKISCKVSGYTFTNYWLNWVKQTPGKGLEWMGRIDPSDSEIHYDQKFKDRVTLTADTSTDTAYMELSSLTSEDTAVYYCALTGIYAMAYWGQGTTVTVSS

SEQ ID NO: 1257 - protein, 5 aa, Artificial Sequence
  PC17H10-HCDR1
NYWLN

SEQ ID NO: 1258 - protein, 17 aa, Artificial Sequence
  PC17H10-HCDR2
RIDPSDSEIHYDQKFKD

SEQ ID NO: 1259 - protein, 8 aa, Artificial Sequence
  PC17H10-HCDR3
TGIYAMAY

SEQ ID NO: 1260 - DNA, 351 bp, Artificial Sequence
  PC17H10-H
gaggtgcagctggtccagtcaggcgccgaagtgaagaagcctggcgccacagtgaagatatcctgcaaggtcagcggctacaccttcaccaactactggctgaactgggtgaaacagacgcccggcaagggcctggaatggatgggcaggatcgaccccagcgacagcgagatccactacgaccagaagttcaaggacagagtcaccctaaccgcggacacgagcaccgacaccgcctacatggagctgtccagcctgacaagcgaggacaccgccgtgtactattgcgccctgaccggcatctacgccatggcctactggggccagggcaccacggtcaccgtctcctca

SEQ ID NO: 1261 - protein, 112 aa, Artificial Sequence
  PC17H10-L
DIVMTQAPLSLPVTPGEPASISCRSSKSLLHSNGNTYLYWYLQKPGQSPQLLIYRMSNLASGVPDRFSGSGSGTDFTLKISRVEAEDVGVYYCLQHLEYPYTFGQGTKLEIK

SEQ ID NO: 1262 - protein, 16 aa, Artificial Sequence
  PC17H10-LCDR1
RSSKSLLHSNGNTYLY

SEQ ID NO: 1263 - protein, 7 aa, Artificial Sequence
  PC17H10-LCDR2
RMSNLAS

SEQ ID NO: 1264 - protein, 9 aa, Artificial Sequence
  PC17H10-LCDR3
LQHLEYPYT

SEQ ID NO: 1265 - DNA, 336 bp, Artificial Sequence
  PC17H10-L
gacatcgtgatgacccaggcacctctaagcctgccagtgaccccaggcgagccagcgtccatcagctgcaggtccagcaagagcctgctgcacagcaacggcaacacctacctgtactggtatctgcagaagccaggccagagcccccagctgctgatctacaggatgagcaacctggctagcggcgtgccagacagattcagcggcagcggctctggaaccgacttcaccctgaagatcagcagggtggaggccgaggacgtgggcgtgtactactgcctgcagcacctggaatacccctacaccttcggccaagggaccaagctggaaatcaag

SEQ ID NO: 1266 - protein, 244 aa, Artificial Sequence
  PC17H10-HL
EVQLVQSGAEVKKPGATVKISCKVSGYTFTNYWLNWVKQTPGKGLEWMGRIDPSDSEIHYDQKFKDRVTLTADTSTDTAYMELSSLTSEDTAVYYCALTGIYAMAYWGQGTTVTVSSGGGGSGGGGSGGGGSDIVMTQAPLSLPVTPGEPASISCRSSKSLLHSNGNTYLYWYLQKPGQSPQLLIYRMSNLASGVPDRFSGSGSGTDFTLKISRVEAEDVGVYYCLQHLEYPYTFGQGTKLEIK

SEQ ID NO: 1267 - DNA, 732 bp, Artificial Sequence
  PC17H10-HL
gaggtgcagctggtccagtcaggcgccgaagtgaagaagcctggcgccacagtgaagatatcctgcaaggtcagcggctacaccttcaccaactactggctgaactgggtgaaacagacgcccggcaagggcctggaatggatgggcaggatcgaccccagcgacagcgagatccactacgaccagaagttcaaggacagagtcaccctaaccgcggacacgagcaccgacaccgcctacatggagctgtccagcctgacaagcgaggacaccgccgtgtactattgcgccctgaccggcatctacgccatggcctactggggccagggcaccacggtcaccgtctcctcaggtggtggtggttctggcggcggcggctccggtggtggtggttctgacatcgtgatgacccaggcacctctaagcctgccagtgaccccaggcgagccagcgtccatcagctgcaggtccagcaagagcctgctgcacagcaacggcaacacctacctgtactggtatctgcagaagccaggccagagcccccagctgctgatctacaggatgagcaacctggctagcggcgtgccagacagattcagcggcagcggctctggaaccgacttcaccctgaagatcagcagggtggaggccgaggacgtgggcgtgtactactgcctgcagcacctggaatacccctacaccttcggccaagggaccaagctggaaatcaag

SEQ ID NO: 1268 - protein, 499 aa, Artificial Sequence
  PC17H10 HL X I2C HL
EVQLVQSGAEVKKPGATVKISCKVSGYTFTNYWLNWVKQTPGKGLEWMGRIDPSDSEIHYDQKFKDRVTLTADTSTDTAYMELSSLTSEDTAVYYCALTGIYAMAYWGQGTTVTVSSGGGGSGGGGSGGGGSDIVMTQAPLSLPVTPGEPASISCRSSKSLLHSNGNTYLYWYLQKPGQSPQLLIYRMSNLASGVPDRFSGSGSGTDFTLKISRVEAEDVGVYYCLQHLEYPYTFGQGTKLEIKSGGGGSEVQLVESGGGLVQPGGSLKLSCAASGFTFNKYAMNWVRQAPGKGLEWVARIRSKYNNYATYYADSVKDRFTISRDDSKNTAYLQMNNLKTEDTAVYYCVRHGNFGNSYISYWAYWGQGTLVTVSSGGGGSGGGGSGGGGSQTVVTQEPSLTVSPGGTVTLTCGSSTGAVTSGNYPNWVQQKPGQAPRGLIGGTKFLAPGTPARFSGSLLGGKAALTLSGVQPEDEAEYYCVLWYSNRWVFGGGTKLTVL

SEQ ID NO: 1269 - DNA, 1497 bp, Artificial Sequence
  PC17H10 HL X I2C HL
gaggtgcagctggtccagtcaggcgccgaagtgaagaagcctggcgccacagtgaagatatcctgcaaggtcagcggctacaccttcaccaactactggctgaactgggtgaaacagacgcccggcaagggcctggaatggatgggcaggatcgaccccagcgacagcgagatccactacgaccagaagttcaaggacagagtcaccctaaccgcggacacgagcaccgacaccgcctacatggagctgtccagcctgacaagcgaggacaccgccgtgtactattgcgccctgaccggcatctacgccatggcctactggggccagggcaccacggtcaccgtctcctcaggtggtggtggttctggcggcggcggctccggtggtggtggttctgacatcgtgatgacccaggcacctctaagcctgccagtgaccccaggcgagccagcgtccatcagctgcaggtccagcaagagcctgctgcacagcaacggcaacacctacctgtactggtatctgcagaagccaggccagagcccccagctgctgatctacaggatgagcaacctggctagcggcgtgccagacagattcagcggcagcggctctggaaccgacttcaccctgaagatcagcagggtggaggccgaggacgtgggcgtgtactactgcctgcagcacctggaatacccctacaccttcggccaagggaccaagctggaaatcaagtccggaggtggtggatccgaggtgcagctggtcgagtctggaggaggattggtgcagcctggagggtcattgaaactctcatgtgcagcctctggattcaccttcaataagtacgccatgaactgggtccgccaggctccaggaaagggtttggaatgggttgctcgcataagaagtaaatataataattatgcaacatattatgccgattcagtgaaagacaggttcaccatctccagagatgattcaaaaaacactgcctatctacaaatgaacaacttgaaaactgaggacactgccgtgtactactgtgtgagacatgggaacttcggtaatagctacatatcctactgggcttactggggccaagggactctggtcaccgtctcctcaggtggtggtggttctggcggcggcggctccggtggtggtggttctcagactgttgtgactcaggaaccttcactcaccgtatcacctggtggaacagtcacactcacttgtggctcctcgactggggctgttacatctggcaactacccaaactgggtccaacaaaaaccaggtcaggcaccccgtggtctaataggtgggactaagttcctcgcccccggtactcctgccagattctcaggctccctgcttggaggcaaggctgccctcaccctctcaggggtacagccagaggatgaggcagaatattactgtgttctatggtacagcaaccgctgggtgttcggtggaggaaccaaactgactgtccta

SEQ ID NO: 1270 - protein, 124 aa, Artificial Sequence
  hCD19 5-A9-H
QVQLVQSGAEVVRPGASVKISCKASGYAFTSYWMNWVRQRPGQGLEWIGQIWPGDGDTNYNGKFKGRVTMTADESTSTAYMELSSLRSEDTAVYYCARRETTTVGRYYYAMDYWGQGTTVTVSS

SEQ ID NO: 1271 - protein, 5 aa, Artificial Sequence
  hCD19 5-A9-HCDR1
SYWMN

SEQ ID NO: 1272 - protein, 17 aa, Artificial Sequence
  hCD19 5-A9-HCDR2
QIWPGDGDTNYNGKFKG

SEQ ID NO: 1273 - protein, 15 aa, Artificial Sequence
  hCD19 5-A9-HCDR3
RETTTVGRYYYAMDY

SEQ ID NO: 1274 - DNA, 372 bp, Artificial Sequence
  hCD19 5-A9-H
caggtgcagctggtccagtctggggctgaggtggtgaggcctggggcctcagtgaagatttcctgcaaggcttctggctatgcattcactagctactggatgaactgggtgaggcagcgccctggacagggtcttgagtggattggacagatttggcctggagatggtgatactaactacaatggaaagttcaagggtagagtcactatgactgctgacgaatccaccagcacagcctacatggaactcagcagcctgcgatctgaggacactgcggtctattactgtgcaagacgggagactacgacggtaggccgttattactatgctatggactactggggccaagggaccacggtcaccgtctcctca

SEQ ID NO: 1275 - protein, 111 aa, Artificial Sequence
  hCD19 5-A9-L
DIQMTQSPSSLSVSVGERVTITCKASQSVDYDGTSYLNWYQQKPGQAPKLLIYDASNLVSGVPSRFSGSGSGTDFTLTISSLQKEDFATYYCQQSTEDPWTFGQGTKVEIK

SEQ ID NO: 1276 - protein, 15 aa, Artificial Sequence
  hCD19 5-A9-LCDR1
KASQSVDYDGTSYLN

SEQ ID NO: 1277 - protein, 7 aa, Artificial Sequence
  hCD19 5-A9-LCDR2
DASNLVS

SEQ ID NO: 1278 - protein, 9 aa, Artificial Sequence
  hCD19 5-A9-LCDR3
QQSTEDPWT

SEQ ID NO: 1279 - DNA, 333 bp, Artificial Sequence
  hCD19 5-A9-L
gacatccagatgacccagtctccatcttctttgtctgtgtctgtaggggagagagtcaccatcacctgcaaggccagccaaagtgttgattatgatggtaccagttatttgaactggtaccaacagaaaccaggacaggcacccaaactcctcatctatgatgcatccaatctagtttctggggtcccatccaggtttagtggcagtgggtctgggacagacttcaccctcaccatcagttctctgcagaaggaggatttcgcaacctattactgtcagcaaagtactgaggatccgtggacgttcggtcaagggaccaaggtggagatcaaa

SEQ ID NO: 1280 - protein, 250 aa, Artificial Sequence
  hCD19 5-A9-LH
DIQMTQSPSSLSVSVGERVTITCKASQSVDYDGTSYLNWYQQKPGQAPKLLIYDASNLVSGVPSRFSGSGSGTDFTLTISSLQKEDFATYYCQQSTEDPWTFGQGTKVEIKGGGGSGGGGSGGGGSQVQLVQSGAEVVRPGASVKISCKASGYAFTSYWMNWVRQRPGQGLEWIGQIWPGDGDTNYNGKFKGRVTMTADESTSTAYMELSSLRSEDTAVYYCARRETTTVGRYYYAMDYWGQGTTVTVSS

SEQ ID NO: 1281 - DNA, 750 bp, Artificial Sequence
  hCD19 5-A9-LH
gacatccagatgacccagtctccatcttctttgtctgtgtctgtaggggagagagtcaccatcacctgcaaggccagccaaagtgttgattatgatggtaccagttatttgaactggtaccaacagaaaccaggacaggcacccaaactcctcatctatgatgcatccaatctagtttctggggtcccatccaggtttagtggcagtgggtctgggacagacttcaccctcaccatcagttctctgcagaaggaggatttcgcaacctattactgtcagcaaagtactgaggatccgtggacgttcggtcaagggaccaaggtggagatcaaaggtggtggtggttctggcggcggcggctccggtggtggtggttctcaggtgcagctggtccagtctggggctgaggtggtgaggcctggggcctcagtgaagatttcctgcaaggcttctggctatgcattcactagctactggatgaactgggtgaggcagcgccctggacagggtcttgagtggattggacagatttggcctggagatggtgatactaactacaatggaaagttcaagggtagagtcactatgactgctgacgaatccaccagcacagcctacatggaactcagcagcctgcgatctgaggacactgcggtctattactgtgcaagacgggagactacgacggtaggccgttattactatgctatggactactggggccaagggaccacggtcaccgtctcctca

SEQ ID NO: 1282 - protein, 504 aa, Artificial Sequence
  hCD19 5-A9 LH x I2C HL
DIQMTQSPSSLSVSVGERVTITCKASQSVDYDGTSYLNWYQQKPGQAPKLLIYDASNLVSGVPSRFSGSGSGTDFTLTISSLQKEDFATYYCQQSTEDPWTFGQGTKVEIKGGGGSGGGGSGGGGSQVQLVQSGAEVVRPGASVKISCKASGYAFTSYWMNWVRQRPGQGLEWIGQIWPGDGDTNYNGKFKGRVTMTADESTSTAYMELSSLRSEDTAVYYCARRETTTVGRYYYAMDYWGQGTTVTVSSGGGGSEVQLVESGGGLVQPGGSLKLSCAASGFTFNKYAMNWVRQAPGKGLEWVARIRSKYNNYATYYADSVKDRFTISRDDSKNTAYLQMNNLKTEDTAVYYCVRHGNFGNSYISYWAYWGQGTLVTVSSGGGGSGGGGSGGGGSQTVVTQEPSLTVSPGGTVTLTCGSSTGAVTSGNYPNWVQQKPGQAPRGLIGGTKFLAPGTPARFSGSLLGGKAALTLSGVQPEDEAEYYCVLWYSNRWVFGGGTKLTVL

SEQ ID NO: 1283 - DNA, 1512 bp, Artificial Sequence
  hCD19 5-A9 LH x I2C HL
gacatccagatgacccagtctccatcttctttgtctgtgtctgtaggggagagagtcaccatcacctgcaaggccagccaaagtgttgattatgatggtaccagttatttgaactggtaccaacagaaaccaggacaggcacccaaactcctcatctatgatgcatccaatctagtttctggggtcccatccaggtttagtggcagtgggtctgggacagacttcaccctcaccatcagttctctgcagaaggaggatttcgcaacctattactgtcagcaaagtactgaggatccgtggacgttcggtcaagggaccaaggtggagatcaaaggtggtggtggttctggcggcggcggctccggtggtggtggttctcaggtgcagctggtccagtctggggctgaggtggtgaggcctggggcctcagtgaagatttcctgcaaggcttctggctatgcattcactagctactggatgaactgggtgaggcagcgccctggacagggtcttgagtggattggacagatttggcctggagatggtgatactaactacaatggaaagttcaagggtagagtcactatgactgctgacgaatccaccagcacagcctacatggaactcagcagcctgcgatctgaggacactgcggtctattactgtgcaagacgggagactacgacggtaggccgttattactatgctatggactactggggccaagggaccacggtcaccgtctcctccggaggtggtggatccgaggtgcagctggtcgagtctggaggaggattggtgcagcctggagggtcattgaaactctcatgtgcagcctctggattcaccttcaataagtacgccatgaactgggtccgccaggctccaggaaagggtttggaatgggttgctcgcataagaagtaaatataataattatgcaacatattatgccgattcagtgaaagacaggttcaccatctccagagatgattcaaaaaacactgcctatctacaaatgaacaacttgaaaactgaggacactgccgtgtactactgtgtgagacatgggaacttcggtaatagctacatatcctactgggcttactggggccaagggactctggtcaccgtctcctcaggtggtggtggttctggcggcggcggctccggtggtggtggttctcagactgttgtgactcaggaaccttcactcaccgtatcacctggtggaacagtcacactcacttgtggctcctcgactggggctgttacatctggcaactacccaaactgggtccaacaaaaaccaggtcaggcaccccgtggtctaataggtgggactaagttcctcgcccccggtactcctgccagattctcaggctccctgcttggaggcaaggctgccctcaccctctcaggggtacagccagaggatgaggcagaatattactgtgttctatggtacagcaaccgctgggtgttcggtggaggaaccaaactgactgtccta

SEQ ID NO: 1284 - protein, 124 aa, Artificial Sequence
  hCD19 2-C6-H
QVQLVQSGAEVKKPGASVKISCKASGYAFTSYWMNWVRQAPGQGLEWIGQIWPGDGDTNYNGKFKGRVTLTADTSTSTAYMELSSLQSEDTAVYYCARRETTTVGRYYYAMDYWGQGTTVTVSS

SEQ ID NO: 1285 - protein, 5 aa, Artificial Sequence
  hCD19 2-C6-HCDR1
SYWMN

SEQ ID NO: 1286 - protein, 17 aa, Artificial Sequence
  hCD19 2-C6-HCDR2
QIWPGDGDTNYNGKFKG

SEQ ID NO: 1287 - protein, 15 aa, Artificial Sequence
  hCD19 2-C6-HCDR3
RETTTVGRYYYAMDY

SEQ ID NO: 1288 - DNA, 372 bp, Artificial Sequence
  hCD19 2-C6-H
caggtgcagctggtccagtctggggctgaggtgaagaagcctggggcctcagtgaagatttcctgcaaggcttctggctatgcattcactagctactggatgaactgggtgaggcaggcccctggacagggtcttgagtggattggacagatttggcctggagatggtgatactaactacaatggaaagttcaagggtagagtcactctgactgctgacacatccaccagcacagcctacatggaactcagcagcctacaatctgaggacactgcggtctattactgtgcaagacgggagactacgacggtaggccgttattactatgctatggactactggggccaagggaccacggtcaccgtctcctca

SEQ ID NO: 1289 - protein, 111 aa, Artificial Sequence
  hCD19 2-C6-L
DIQMTQSPSSLSASVGERVTITCKASQSVDYDGSSYLNWYQQKPGKAPKLLIYDASNLVSGVPPRFSGSGSGTDFTLTIHSLQPEDFATYYCQQSTEDPWTFGQGTKVEIK

SEQ ID NO: 1290 - protein, 15 aa, Artificial Sequence
  hCD19 2-C6-LCDR1
KASQSVDYDGSSYLN

SEQ ID NO: 1291 - protein, 7 aa, Artificial Sequence
  hCD19 2-C6-LCDR2
DASNLVS

SEQ ID NO: 1292 - protein, 9 aa, Artificial Sequence
  hCD19 2-C6-LCDR3
QQSTEDPWT

SEQ ID NO: 1293 - DNA, 333 bp, Artificial Sequence
  hCD19 2-C6-L
gacatccagatgacccagtctccatcttctttgtctgcgtctgtaggggagagagtcaccatcacctgcaaggccagccaaagtgttgattatgatggttcgagttatttgaactggtaccaacagaaaccaggaaaggcacccaaactcctcatctatgatgcatccaatctagtttctggggtcccacccaggtttagtggcagtgggtctgggacagacttcaccctcaccatccattctctgcagccggaggatttcgcaacctattactgtcagcaaagtactgaggatccgtggacgttcggtcaagggaccaaggtggagatcaaa

SEQ ID NO: 1294 - protein, 250 aa, Artificial Sequence
  hCD19 2-C6-LH
DIQMTQSPSSLSASVGERVTITCKASQSVDYDGSSYLNWYQQKPGKAPKLLIYDASNLVSGVPPRFSGSGSGTDFTLTIHSLQPEDFATYYCQQSTEDPWTFGQGTKVEIKGGGGSGGGGSGGGGSQVQLVQSGAEVKKPGASVKISCKASGYAFTSYWMNWVRQAPGQGLEWIGQIWPGDGDTNYNGKFKGRVTLTADTSTSTAYMELSSLQSEDTAVYYCARRETTTVGRYYYAMDYWGQGTTVTVSS

SEQ ID NO: 1295 - DNA, 750 bp, Artificial Sequence
  hCD19 2-C6-LH
gacatccagatgacccagtctccatcttctttgtctgcgtctgtaggggagagagtcaccatcacctgcaaggccagccaaagtgttgattatgatggttcgagttatttgaactggtaccaacagaaaccaggaaaggcacccaaactcctcatctatgatgcatccaatctagtttctggggtcccacccaggtttagtggcagtgggtctgggacagacttcaccctcaccatccattctctgcagccggaggatttcgcaacctattactgtcagcaaagtactgaggatccgtggacgttcggtcaagggaccaaggtggagatcaaaggtggtggtggttctggcggcggcggctccggtggtggtggttctcaggtgcagctggtccagtctggggctgaggtgaagaagcctggggcctcagtgaagatttcctgcaaggcttctggctatgcattcactagctactggatgaactgggtgaggcaggcccctggacagggtcttgagtggattggacagatttggcctggagatggtgatactaactacaatggaaagttcaagggtagagtcactctgactgctgacacatccaccagcacagcctacatggaactcagcagcctacaatctgaggacactgcggtctattactgtgcaagacgggagactacgacggtaggccgttattactatgctatggactactggggccaagggaccacggtcaccgtctcctca

SEQ ID NO: 1296 - protein, 504 aa, Artificial Sequence
  hCD19 2-C6 LH x I2C HL
DIQMTQSPSSLSASVGERVTITCKASQSVDYDGSSYLNWYQQKPGKAPKLLIYDASNLVSGVPPRFSGSGSGTDFTLTIHSLQPEDFATYYCQQSTEDPWTFGQGTKVEIKGGGGSGGGGSGGGGSQVQLVQSGAEVKKPGASVKISCKASGYAFTSYWMNWVRQAPGQGLEWIGQIWPGDGDTNYNGKFKGRVTLTADTSTSTAYMELSSLQSEDTAVYYCARRETTTVGRYYYAMDYWGQGTTVTVSSGGGGSEVQLVESGGGLVQPGGSLKLSCAASGFTFNKYAMNWVRQAPGKGLEWVARIRSKYNNYATYYADSVKDRFTISRDDSKNTAYLQMNNLKTEDTAVYYCVRHGNFGNSYISYWAYWGQGTLVTVSSGGGGSGGGGSGGGGSQTVVTQEPSLTVSPGGTVTLTCGSSTGAVTSGNYPNWVQQKPGQAPRGLIGGTKFLAPGTPARFSGSLLGGKAALTLSGVQPEDEAEYYCVLWYSNRWVFGGGTKLTVL

SEQ ID NO: 1297 - DNA, 1512 bp, Artificial Sequence
  hCD19 2-C6 LH x I2C HL
gacatccagatgacccagtctccatcttctttgtctgcgtctgtaggggagagagtcaccatcacctgcaaggccagccaaagtgttgattatgatggttcgagttatttgaactggtaccaacagaaaccaggaaaggcacccaaactcctcatctatgatgcatccaatctagtttctggggtcccacccaggtttagtggcagtgggtctgggacagacttcaccctcaccatccattctctgcagccggaggatttcgcaacctattactgtcagcaaagtactgaggatccgtggacgttcggtcaagggaccaaggtggagatcaaaggtggtggtggttctggcggcggcggctccggtggtggtggttctcaggtgcagctggtccagtctggggctgaggtgaagaagcctggggcctcagtgaagatttcctgcaaggcttctggctatgcattcactagctactggatgaactgggtgaggcaggcccctggacagggtcttgagtggattggacagatttggcctggagatggtgatactaactacaatggaaagttcaagggtagagtcactctgactgctgacacatccaccagcacagcctacatggaactcagcagcctacaatctgaggacactgcggtctattactgtgcaagacgggagactacgacggtaggccgttattactatgctatggactactggggccaagggaccacggtcaccgtctcctccggaggtggtggatccgaggtgcagctggtcgagtctggaggaggattggtgcagcctggagggtcattgaaactctcatgtgcagcctctggattcaccttcaataagtacgccatgaactgggtccgccaggctccaggaaagggtttggaatgggttgctcgcataagaagtaaatataataattatgcaacatattatgccgattcagtgaaagacaggttcaccatctccagagatgattcaaaaaacactgcctatctacaaatgaacaacttgaaaactgaggacactgccgtgtactactgtgtgagacatgggaacttcggtaatagctacatatcctactgggcttactggggccaagggactctggtcaccgtctcctcaggtggtggtggttctggcggcggcggctccggtggtggtggttctcagactgttgtgactcaggaaccttcactcaccgtatcacctggtggaacagtcacactcacttgtggctcctcgactggggctgttacatctggcaactacccaaactgggtccaacaaaaaccaggtcaggcaccccgtggtctaataggtgggactaagttcctcgcccccggtactcctgccagattctcaggctccctgcttggaggcaaggctgccctcaccctctcaggggtacagccagaggatgaggcagaatattactgtgttctatggtacagcaaccgctgggtgttcggtggaggaaccaaactgactgtccta

SEQ ID NO: 1298 - protein, 124 aa, Artificial Sequence
  hCD19 4-C7-H
QVQLVQSGAEVVKPGASVKISCKASGYAFTSYWMNWVRQRPGQGLEWIGQIWPGDGDTNYNGKFKGRVTMTADESTSTAYMELSSLRSEDTAVYYCARRETTTVGRYYYAMDYWGQGTTVTVSS

SEQ ID NO: 1299 - protein, 5 aa, Artificial Sequence
  hCD19 4-C7-HCDR1
SYWMN

SEQ ID NO: 1300 - protein, 17 aa, Artificial Sequence
  hCD19 4-C7-HCDR2
QIWPGDGDTNYNGKFKG

SEQ ID NO: 1301 - protein, 15 aa, Artificial Sequence
  hCD19 4-C7-HCDR3
RETTTVGRYYYAMDY

SEQ ID NO: 1302 - DNA, 372 bp, Artificial Sequence
  hCD19 4-C7-H
caggtgcagctggtccagtctggggctgaggtggtgaagcctggggcctcagtgaagatttcctgcaaggcttctggctatgcattcactagctactggatgaactgggtgaggcagcgccctggacagggtcttgagtggattggacagatttggcctggagatggtgatactaactacaatggaaagttcaagggtagagtcactatgactgctgacgaatccaccagcacagcctacatggaactcagcagcctgcgatctgaggacactgcggtctattactgtgcaagacgggagactacgacggtaggccgttattactatgctatggactactggggccaagggaccacggtcaccgtctcctca

SEQ ID NO: 1303 - protein, 111 aa, Artificial Sequence
  hCD19 4-C7-L
DIQMTQSPSSLSASLGDRVTITCKASQSVDYDGTSYLNWYQQKPGQPPKLLIYDASNLVSGVPSRFSGSGSGTDFTLTISPLEQEDFATYYCQQSTEDPWTFGQGTKVEIK

SEQ ID NO: 1304 - protein, 15 aa, Artificial Sequence
  hCD19 4-C7-LCDR1
KASQSVDYDGSSYLN

SEQ ID NO: 1305 - protein, 7 aa, Artificial Sequence
  hCD19 4-C7-LCDR2
DASNLVS

SEQ ID NO: 1306 - protein, 9 aa, Artificial Sequence
  hCD19 4-C7-LCDR3
QQSTEDPWT

SEQ ID NO: 1307 - DNA, 333 bp, Artificial Sequence
  hCD19 4-C7-L
gacatccagatgacccagtctccatcttctttgtctgcgtctctaggggacagagtcaccatcacctgcaaggccagccaaagtgttgattatgatggtacgagttatttgaactggtaccaacagaaaccaggacagccacccaaactcctcatctatgatgcatccaatctagtttctggggtcccatccaggtttagtggcagtgggtctgggacagacttcaccctcaccatcagtcctctggagcaggaggatttcgcaacctattactgtcagcaaagtactgaggatccgtggacgttcggtcaagggaccaaggtggagatcaaa

SEQ ID NO: 1308 - protein, 250 aa, Artificial Sequence
  hCD19 4-C7-LH
DIQMTQSPSSLSASLGDRVTITCKASQSVDYDGTSYLNWYQQKPGQPPKLLIYDASNLVSGVPSRFSGSGSGTDFTLTISPLEQEDFATYYCQQSTEDPWTFGQGTKVEIKGGGGSGGGGSGGGGSQVQLVQSGAEVVKPGASVKISCKASGYAFTSYWMNWVRQRPGQGLEWIGQIWPGDGDTNYNGKFKGRVTMTADESTSTAYMELSSLRSEDTAVYYCARRETTTVGRYYYAMDYWGQGTTVTVSS

SEQ ID NO: 1309 - DNA, 750 bp, Artificial Sequence
  hCD19 4-C7-LH
gacatccagatgacccagtctccatcttctttgtctgcgtctctaggggacagagtcaccatcacctgcaaggccagccaaagtgttgattatgatggtacgagttatttgaactggtaccaacagaaaccaggacagccacccaaactcctcatctatgatgcatccaatctagtttctggggtcccatccaggtttagtggcagtgggtctgggacagacttcaccctcaccatcagtcctctggagcaggaggatttcgcaacctattactgtcagcaaagtactgaggatccgtggacgttcggtcaagggaccaaggtggagatcaaaggtggtggtggttctggcggcggcggctccggtggtggtggttctcaggtgcagctggtccagtctggggctgaggtggtgaagcctggggcctcagtgaagatttcctgcaaggcttctggctatgcattcactagctactggatgaactgggtgaggcagcgccctggacagggtcttgagtggattggacagatttggcctggagatggtgatactaactacaatggaaagttcaagggtagagtcactatgactgctgacgaatccaccagcacagcctacatggaactcagcagcctgcgatctgaggacactgcggtctattactgtgcaagacgggagactacgacggtaggccgttattactatgctatggactactggggccaagggaccacggtcaccgtctcctca

SEQ ID NO: 1310 - protein, 504 aa, Artificial Sequence
  hCD19 4-C7 LH x I2C HL
DIQMTQSPSSLSASLGDRVTITCKASQSVDYDGTSYLNWYQQKPGQPPKLLIYDASNLVSGVPSRFSGSGSGTDFTLTISPLEQEDFATYYCQQSTEDPWTFGQGTKVEIKGGGGSGGGGSGGGGSQVQLVQSGAEVVKPGASVKISCKASGYAFTSYWMNWVRQRPGQGLEWIGQIWPGDGDTNYNGKFKGRVTMTADESTSTAYMELSSLRSEDTAVYYCARRETTTVGRYYYAMDYWGQGTTVTVSSGGGGSEVQLVESGGGLVQPGGSLKLSCAASGFTFNKYAMNWVRQAPGKGLEWVARIRSKYNNYATYYADSVKDRFTISRDDSKNTAYLQMNNLKTEDTAVYYCVRHGNFGNSYISYWAYWGQGTLVTVSSGGGGSGGGGSGGGGSQTVVTQEPSLTVSPGGTVTLTCGSSTGAVTSGNYPNWVQQKPGQAPRGLIGGTKFLAPGTPARFSGSLLGGKAALTLSGVQPEDEAEYYCVLWYSNRWVFGGGTKLTVL

SEQ ID NO: 1311 - DNA, 1512 bp, Artificial Sequence
  hCD19 4-C7 LH x I2C HL
gacatccagatgacccagtctccatcttctttgtctgcgtctctaggggacagagtcaccatcacctgcaaggccagccaaagtgttgattatgatggtacgagttatttgaactggtaccaacagaaaccaggacagccacccaaactcctcatctatgatgcatccaatctagtttctggggtcccatccaggtttagtggcagtgggtctgggacagacttcaccctcaccatcagtcctctggagcaggaggatttcgcaacctattactgtcagcaaagtactgaggatccgtggacgttcggtcaagggaccaaggtggagatcaaaggtggtggtggttctggcggcggcggctccggtggtggtggttctcaggtgcagctggtccagtctggggctgaggtggtgaagcctggggcctcagtgaagatttcctgcaaggcttctggctatgcattcactagctactggatgaactgggtgaggcagcgccctggacagggtcttgagtggattggacagatttggcctggagatggtgatactaactacaatggaaagttcaagggtagagtcactatgactgctgacgaatccaccagcacagcctacatggaactcagcagcctgcgatctgaggacactgcggtctattactgtgcaagacgggagactacgacggtaggccgttattactatgctatggactactggggccaagggaccacggtcaccgtctcctccggaggtggtggatccgaggtgcagctggtcgagtctggaggaggattggtgcagcctggagggtcattgaaactctcatgtgcagcctctggattcaccttcaataagtacgccatgaactgggtccgccaggctccaggaaagggtttggaatgggttgctcgcataagaagtaaatataataattatgcaacatattatgccgattcagtgaaagacaggttcaccatctccagagatgattcaaaaaacactgcctatctacaaatgaacaacttgaaaactgaggacactgccgtgtactactgtgtgagacatgggaacttcggtaatagctacatatcctactgggcttactggggccaagggactctggtcaccgtctcctcaggtggtggtggttctggcggcggcggctccggtggtggtggttctcagactgttgtgactcaggaaccttcactcaccgtatcacctggtggaacagtcacactcacttgtggctcctcgactggggctgttacatctggcaactacccaaactgggtccaacaaaaaccaggtcaggcaccccgtggtctaataggtgggactaagttcctcgcccccggtactcctgccagattctcaggctccctgcttggaggcaaggctgccctcaccctctcaggggtacagccagaggatgaggcagaatattactgtgttctatggtacagcaaccgctgggtgttcggtggaggaaccaaactgactgtccta

SEQ ID NO: 1312 - protein, 124 aa, Artificial Sequence; identical to SEQ ID NO: 1298
  hCD19 2-D7-H

SEQ ID NO: 1313 - protein, 5 aa, Artificial Sequence
  hCD19 2-D7-HCDR1
SYWMN

SEQ ID NO: 1314 - protein, 17 aa, Artificial Sequence
  hCD19 2-D7-HCDR2
QIWPGDGDTNYNGKFKG

SEQ ID NO: 1315 - protein, 15 aa, Artificial Sequence
  hCD19 2-D7-HCDR3
RETTTVGRYYYAMDY

SEQ ID NO: 1316 - DNA, 372 bp, Artificial Sequence; identical to SEQ ID NO: 1302
  hCD19 2-D7-H

SEQ ID NO: 1317 - protein, 111 aa, Artificial Sequence; identical to SEQ ID NO: 1289
  hCD19 2-D7-L

SEQ ID NO: 1318 - protein, 15 aa, Artificial Sequence
  hCD19 2-D7-LCDR1
KASQSVDYDGSSYLN

SEQ ID NO: 1319 - protein, 7 aa, Artificial Sequence
  hCD19 2-D7-LCDR2
DASNLVS

SEQ ID NO: 1320 - protein, 9 aa, Artificial Sequence
  hCD19 2-D7-LCDR3
QQSTEDPWT

SEQ ID NO: 1321 - DNA, 333 bp, Artificial Sequence; identical to SEQ ID NO: 1293
  hCD19 2-D7-L

SEQ ID NO: 1322 - protein, 250 aa, Artificial Sequence
  hCD19 2-D7-LH
DIQMTQSPSSLSASVGERVTITCKASQSVDYDGSSYLNWYQQKPGKAPKLLIYDASNLVSGVPPRFSGSGSGTDFTLTIHSLQPEDFATYYCQQSTEDPWTFGQGTKVEIKGGGGSGGGGSGGGGSQVQLVQSGAEVVKPGASVKISCKASGYAFTSYWMNWVRQRPGQGLEWIGQIWPGDGDTNYNGKFKGRVTMTADESTSTAYMELSSLRSEDTAVYYCARRETTTVGRYYYAMDYWGQGTTVTVSS

SEQ ID NO: 1323 - DNA, 750 bp, Artificial Sequence
  hCD19 2-D7-LH
gacatccagatgacccagtctccatcttctttgtctgcgtctgtaggggagagagtcaccatcacctgcaaggccagccaaagtgttgattatgatggttcgagttatttgaactggtaccaacagaaaccaggaaaggcacccaaactcctcatctatgatgcatccaatctagtttctggggtcccacccaggtttagtggcagtgggtctgggacagacttcaccctcaccatccattctctgcagccggaggatttcgcaacctattactgtcagcaaagtactgaggatccgtggacgttcggtcaagggaccaaggtggagatcaaaggtggtggtggttctggcggcggcggctccggtggtggtggttctcaggtgcagctggtccagtctggggctgaggtggtgaagcctggggcctcagtgaagatttcctgcaaggcttctggctatgcattcactagctactggatgaactgggtgaggcagcgccctggacagggtcttgagtggattggacagatttggcctggagatggtgatactaactacaatggaaagttcaagggtagagtcactatgactgctgacgaatccaccagcacagcctacatggaactcagcagcctgcgatctgaggacactgcggtctattactgtgcaagacgggagactacgacggtaggccgttattactatgctatggactactggggccaagggaccacggtcaccgtctcctca

SEQ ID NO: 1324 - protein, 504 aa, Artificial Sequence
  hCD19 2-D7 LH x I2C HL
DIQMTQSPSSLSASVGERVTITCKASQSVDYDGSSYLNWYQQKPGKAPKLLIYDASNLVSGVPPRFSGSGSGTDFTLTIHSLQPEDFATYYCQQSTEDPWTFGQGTKVEIKGGGGSGGGGSGGGGSQVQLVQSGAEVVKPGASVKISCKASGYAFTSYWMNWVRQRPGQGLEWIGQIWPGDGDTNYNGKFKGRVTMTADESTSTAYMELSSLRSEDTAVYYCARRETTTVGRYYYAMDYWGQGTTVTVSSGGGGSEVQLVESGGGLVQPGGSLKLSCAASGFTFNKYAMNWVRQAPGKGLEWVARIRSKYNNYATYYADSVKDRFTISRDDSKNTAYLQMNNLKTEDTAVYYCVRHGNFGNSYISYWAYWGQGTLVTVSSGGGGSGGGGSGGGGSQTVVTQEPSLTVSPGGTVTLTCGSSTGAVTSGNYPNWVQQKPGQAPRGLIGGTKFLAPGTPARFSGSLLGGKAALTLSGVQPEDEAEYYCVLWYSNRWVFGGGTKLTVL

SEQ ID NO: 1325 - DNA, 1512 bp, Artificial Sequence
  hCD19 2-D7 LH x I2C HL
gacatccagatgacccagtctccatcttctttgtctgcgtctgtaggggagagagtcaccatcacctgcaaggccagccaaagtgttgattatgatggttcgagttatttgaactggtaccaacagaaaccaggaaaggcacccaaactcctcatctatgatgcatccaatctagtttctggggtcccacccaggtttagtggcagtgggtctgggacagacttcaccctcaccatccattctctgcagccggaggatttcgcaacctattactgtcagcaaagtactgaggatccgtggacgttcggtcaagggaccaaggtggagatcaaaggtggtggtggttctggcggcggcggctccggtggtggtggttctcaggtgcagctggtccagtctggggctgaggtggtgaagcctggggcctcagtgaagatttcctgcaaggcttctggctatgcattcactagctactggatgaactgggtgaggcagcgccctggacagggtcttgagtggattggacagatttggcctggagatggtgatactaactacaatggaaagttcaagggtagagtcactatgactgctgacgaatccaccagcacagcctacatggaactcagcagcctgcgatctgaggacactgcggtctattactgtgcaagacgggagactacgacggtaggccgttattactatgctatggactactggggccaagggaccacggtcaccgtctcctccggaggtggtggatccgaggtgcagctggtcgagtctggaggaggattggtgcagcctggagggtcattgaaactctcatgtgcagcctctggattcaccttcaataagtacgccatgaactgggtccgccaggctccaggaaagggtttggaatgggttgctcgcataagaagtaaatataataattatgcaacatattatgccgattcagtgaaagacaggttcaccatctccagagatgattcaaaaaacactgcctatctacaaatgaacaacttgaaaactgaggacactgccgtgtactactgtgtgagacatgggaacttcggtaatagctacatatcctactgggcttactggggccaagggactctggtcaccgtctcctcaggtggtggtggttctggcggcggcggctccggtggtggtggttctcagactgttgtgactcaggaaccttcactcaccgtatcacctggtggaacagtcacactcacttgtggctcctcgactggggctgttacatctggcaactacccaaactgggtccaacaaaaaccaggtcaggcaccccgtggtctaataggtgggactaagttcctcgcccccggtactcctgccagattctcaggctccctgcttggaggcaaggctgccctcaccctctcaggggtacagccagaggatgaggcagaatattactgtgttctatggtacagcaaccgctgggtgttcggtggaggaaccaaactgactgtccta

SEQ ID NO: 1326 - protein, 124 aa, Artificial Sequence; identical to SEQ ID NO: 1298
  hCD19 2-D4-H

SEQ ID NO: 1327 - protein, 5 aa, Artificial Sequence
  hCD19 2-D4-HCDR1
SYWMN

SEQ ID NO: 1328 - protein, 17 aa, Artificial Sequence
  hCD19 2-D4-HCDR2
QIWPGDGDTNYNGKFKG

SEQ ID NO: 1329 - protein, 15 aa, Artificial Sequence
  hCD19 2-D4-HCDR3
RETTTVGRYYYAMDY

SEQ ID NO: 1330 - DNA, 372 bp, Artificial Sequence; identical to SEQ ID NO: 1302
  hCD19 2-D4-H

SEQ ID NO: 1331 - protein, 111 aa, Artificial Sequence
  hCD19 2-D4-L
DIQMTQSPASLSVSVGERVTITCKASQSVDYDGTSYLNWYQQKPGQAPKLLIYDASNLVSGVPSRFSGSGSGTDFTLTISSLQPEDFATYYCQQSTEDPWTFGQGTKVEIK

SEQ ID NO: 1332 - protein, 15 aa, Artificial Sequence
  hCD19 2-D4-LCDR1
KASQSVDYDGSSYLN

SEQ ID NO: 1333 - protein, 7 aa, Artificial Sequence
  hCD19 2-D4-LCDR2
DASNLVS

SEQ ID NO: 1334 - protein, 9 aa, Artificial Sequence
  hCD19 2-D4-LCDR3
QQSTEDPWT

SEQ ID NO: 1335 - DNA, 333 bp, Artificial Sequence
  hCD19 2-D4-L
gacatccagatgacccagtctccagcttctttgtctgtgtctgtaggggagagagtcaccatcacctgcaaggccagccaaagtgttgattatgatggtaccagttatttgaactggtaccaacagaaaccaggacaggcacccaaactcctcatctatgatgcatccaatctagtttctggggtcccatccaggtttagtggcagtgggtctgggacagacttcaccctcaccatcagttctctgcagccggaggatttcgcaacctattactgtcagcaaagtactgaggatccgtggacgttcggtcaagggaccaaggtggagatcaaa

SEQ ID NO: 1336 - protein, 250 aa, Artificial Sequence
  hCD19 2-D4-LH
DIQMTQSPASLSVSVGERVTITCKASQSVDYDGTSYLNWYQQKPGQAPKLLIYDASNLVSGVPSRFSGSGSGTDFTLTISSLQPEDFATYYCQQSTEDPWTFGQGTKVEIKGGGGSGGGGSGGGGSQVQLVQSGAEVVKPGASVKISCKASGYAFTSYWMNWVRQRPGQGLEWIGQIWPGDGDTNYNGKFKGRVTMTADESTSTAYMELSSLRSEDTAVYYCARRETTTVGRYYYAMDYWGQGTTVTVSS

SEQ ID NO: 1337 - DNA, 750 bp, Artificial Sequence
  hCD19 2-D4-LH
gacatccagatgacccagtctccagcttctttgtctgtgtctgtaggggagagagtcaccatcacctgcaaggccagccaaagtgttgattatgatggtaccagttatttgaactggtaccaacagaaaccaggacaggcacccaaactcctcatctatgatgcatccaatctagtttctggggtcccatccaggtttagtggcagtgggtctgggacagacttcaccctcaccatcagttctctgcagccggaggatttcgcaacctattactgtcagcaaagtactgaggatccgtggacgttcggtcaagggaccaaggtggagatcaaaggtggtggtggttctggcggcggcggctccggtggtggtggttctcaggtgcagctggtccagtctggggctgaggtggtgaagcctggggcctcagtgaagatttcctgcaaggcttctggctatgcattcactagctactggatgaactgggtgaggcagcgccctggacagggtcttgagtggattggacagatttggcctggagatggtgatactaactacaatggaaagttcaagggtagagtcactatgactgctgacgaatccaccagcacagcctacatggaactcagcagcctgcgatctgaggacactgcggtctattactgtgcaagacgggagactacgacggtaggccgttattactatgctatggactactggggccaagggaccacggtcaccgtctcctca

SEQ ID NO: 1338 - protein, 504 aa, Artificial Sequence
  hCD19 2-D4 LH x I2C HL
DIQMTQSPASLSVSVGERVTITCKASQSVDYDGTSYLNWYQQKPGQAPKLLIYDASNLVSGVPSRFSGSGSGTDFTLTISSLQPEDFATYYCQQSTEDPWTFGQGTKVEIKGGGGSGGGGSGGGGSQVQLVQSGAEVVKPGASVKISCKASGYAFTSYWMNWVRQRPGQGLEWIGQIWPGDGDTNYNGKFKGRVTMTADESTSTAYMELSSLRSEDTAVYYCARRETTTVGRYYYAMDYWGQGTTVTVSSGGGGSEVQLVESGGGLVQPGGSLKLSCAASGFTFNKYAMNWVRQAPGKGLEWVARIRSKYNNYATYYADSVKDRFTISRDDSKNTAYLQMNNLKTEDTAVYYCVRHGNFGNSYISYWAYWGQGTLVTVSSGGGGSGGGGSGGGGSQTVVTQEPSLTVSPGGTVTLTCGSSTGAVTSGNYPNWVQQKPGQAPRGLIGGTKFLAPGTPARFSGSLLGGKAALTLSGVQPEDEAEYYCVLWYSNRWVFGGGTKLTVL

SEQ ID NO: 1339 - DNA, 1512 bp, Artificial Sequence
  hCD19 2-D4 LH x I2C HL
gacatccagatgacccagtctccagcttctttgtctgtgtctgtaggggagagagtcaccatcacctgcaaggccagccaaagtgttgattatgatggtaccagttatttgaactggtaccaacagaaaccaggacaggcacccaaactcctcatctatgatgcatccaatctagtttctggggtcccatccaggtttagtggcagtgggtctgggacagacttcaccctcaccatcagttctctgcagccggaggatttcgcaacctattactgtcagcaaagtactgaggatccgtggacgttcggtcaagggaccaaggtggagatcaaaggtggtggtggttctggcggcggcggctccggtggtggtggttctcaggtgcagctggtccagtctggggctgaggtggtgaagcctggggcctcagtgaagatttcctgcaaggcttctggctatgcattcactagctactggatgaactgggtgaggcagcgccctggacagggtcttgagtggattggacagatttggcctggagatggtgatactaactacaatggaaagttcaagggtagagtcactatgactgctgacgaatccaccagcacagcctacatggaactcagcagcctgcgatctgaggacactgcggtctattactgtgcaagacgggagactacgacggtaggccgttattactatgctatggactactggggccaagggaccacggtcaccgtctcctccggaggtggtggatccgaggtgcagctggtcgagtctggaggaggattggtgcagcctggagggtcattgaaactctcatgtgcagcctctggattcaccttcaataagtacgccatgaactgggtccgccaggctccaggaaagggtttggaatgggttgctcgcataagaagtaaatataataattatgcaacatattatgccgattcagtgaaagacaggttcaccatctccagagatgattcaaaaaacactgcctatctacaaatgaacaacttgaaaactgaggacactgccgtgtactactgtgtgagacatgggaacttcggtaatagctacatatcctactgggcttactggggccaagggactctggtcaccgtctcctcaggtggtggtggttctggcggcggcggctccggtggtggtggttctcagactgttgtgactcaggaaccttcactcaccgtatcacctggtggaacagtcacactcacttgtggctcctcgactggggctgttacatctggcaactacccaaactgggtccaacaaaaaccaggtcaggcaccccgtggtctaataggtgggactaagttcctcgcccccggtactcctgccagattctcaggctccctgcttggaggcaaggctgccctcaccctctcaggggtacagccagaggatgaggcagaatattactgtgttctatggtacagcaaccgctgggtgttcggtggaggaaccaaactgactgtccta

SEQ ID NO: 1340 - protein, 124 aa, Artificial Sequence; identical to SEQ ID NO: 1298
  hCD19 5-G3-H

SEQ ID NO: 1341 - protein, 5 aa, Artificial Sequence
  hCD19 5-G3-HCDR1
SYWMN

SEQ ID NO: 1342 - protein, 17 aa, Artificial Sequence
  hCD19 5-G3-HCDR2
QIWPGDGDTNYNGKFKG

SEQ ID NO: 1343 - protein, 15 aa, Artificial Sequence
  hCD19 5-G3-HCDR3
RETTTVGRYYYAMDY

SEQ ID NO: 1344 - DNA, 372 bp, Artificial Sequence; identical to SEQ ID NO: 1302
  hCD19 5-G3-H

SEQ ID NO: 1345 - protein, 111 aa, Artificial Sequence
  hCD19 5-G3-L
DIQMTQSPSSLSASVGDRVTITCKASQSVDYDGLSYLNWYQQKPGQAPKLLIYDASNLVSGIPSRFSGSGSGTDFTLTISSLEPEDFATYYCQQSTEDPWTFGQGTKVEIK

SEQ ID NO: 1346 - protein, 15 aa, Artificial Sequence
  hCD19 5-G3-LCDR1
KASQSVDYDGSSYLN

SEQ ID NO: 1347 - protein, 7 aa, Artificial Sequence
  hCD19 5-G3-LCDR2
DASNLVS

SEQ ID NO: 1348 - protein, 9 aa, Artificial Sequence
  hCD19 5-G3-LCDR3
QQSTEDPWT

SEQ ID NO: 1349 - DNA, 333 bp, Artificial Sequence
  hCD19 5-G3-L
gacatccagatgacccagtctccatcttctttgtctgcgtctgtaggggacagagtcaccatcacctgcaaggccagccaaagtgttgattatgatggtctcagttatttgaactggtaccaacagaaaccaggacaggcacccaaactcctcatctatgatgcatccaatctagtttctgggatcccatccaggtttagtggcagtgggtctgggacagacttcaccctcaccatcagttctctggagccggaggatttcgcaacctattactgtcagcaaagtactgaggatccgtggacgttcggtcaagggaccaaggtggagatcaaa

SEQ ID NO: 1350 - protein, 250 aa, Artificial Sequence
  hCD19 5-G3-LH
DIQMTQSPSSLSASVGDRVTITCKASQSVDYDGLSYLNWYQQKPGQAPKLLIYDASNLVSGIPSRFSGSGSGTDFTLTISSLEPEDFATYYCQQSTEDPWTFGQGTKVEIKGGGGSGGGGSGGGGSQVQLVQSGAEVVKPGASVKISCKASGYAFTSYWMNWVRQRPGQGLEWIGQIWPGDGDTNYNGKFKGRVTMTADESTSTAYMELSSLRSEDTAVYYCARRETTTVGRYYYAMDYWGQGTTVTVSS

SEQ ID NO: 1351 - DNA, 750 bp, Artificial Sequence
  hCD19 5-G3-LH
gacatccagatgacccagtctccatcttctttgtctgcgtctgtaggggacagagtcaccatcacctgcaaggccagccaaagtgttgattatgatggtctcagttatttgaactggtaccaacagaaaccaggacaggcacccaaactcctcatctatgatgcatccaatctagtttctgggatcccatccaggtttagtggcagtgggtctgggacagacttcaccctcaccatcagttctctggagccggaggatttcgcaacctattactgtcagcaaagtactgaggatccgtggacgttcggtcaagggaccaaggtggagatcaaaggtggtggtggttctggcggcggcggctccggtggtggtggttctcaggtgcagctggtccagtctggggctgaggtggtgaagcctggggcctcagtgaagatttcctgcaaggcttctggctatgcattcactagctactggatgaactgggtgaggcagcgccctggacagggtcttgagtggattggacagatttggcctggagatggtgatactaactacaatggaaagttcaagggtagagtcactatgactgctgacgaatccaccagcacagcctacatggaactcagcagcctgcgatctgaggacactgcggtctattactgtgcaagacgggagactacgacggtaggccgttattactatgctatggactactggggccaagggaccacggtcaccgtctcctca

SEQ ID NO: 1352 - protein, 504 aa, Artificial Sequence
  hCD19 5-G3 LH x I2C HL
DIQMTQSPSSLSASVGDRVTITCKASQSVDYDGLSYLNWYQQKPGQAPKLLIYDASNLVSGIPSRFSGSGSGTDFTLTISSLEPEDFATYYCQQSTEDPWTFGQGTKVEIKGGGGSGGGGSGGGGSQVQLVQSGAEVVKPGASVKISCKASGYAFTSYWMNWVRQRPGQGLEWIGQIWPGDGDTNYNGKFKGRVTMTADESTSTAYMELSSLRSEDTAVYYCARRETTTVGRYYYAMDYWGQGTTVTVSSGGGGSEVQLVESGGGLVQPGGSLKLSCAASGFTFNKYAMNWVRQAPGKGLEWVARIRSKYNNYATYYADSVKDRFTISRDDSKNTAYLQMNNLKTEDTAVYYCVRHGNFGNSYISYWAYWGQGTLVTVSSGGGGSGGGGSGGGGSQTVVTQEPSLTVSPGGTVTLTCGSSTGAVTSGNYPNWVQQKPGQAPRGLIGGTKFLAPGTPARFSGSLLGGKAALTLSGVQPEDEAEYYCVLWYSNRWVFGGGTKLTVL

SEQ ID NO: 1353 - DNA, 1512 bp, Artificial Sequence
  hCD19 5-G3 LH x I2C HL
gacatccagatgacccagtctccatcttctttgtctgcgtctgtaggggacagagtcaccatcacctgcaaggccagccaaagtgttgattatgatggtctcagttatttgaactggtaccaacagaaaccaggacaggcacccaaactcctcatctatgatgcatccaatctagtttctgggatcccatccaggtttagtggcagtgggtctgggacagacttcaccctcaccatcagttctctggagccggaggatttcgcaacctattactgtcagcaaagtactgaggatccgtggacgttcggtcaagggaccaaggtggagatcaaaggtggtggtggttctggcggcggcggctccggtggtggtggttctcaggtgcagctggtccagtctggggctgaggtggtgaagcctggggcctcagtgaagatttcctgcaaggcttctggctatgcattcactagctactggatgaactgggtgaggcagcgccctggacagggtcttgagtggattggacagatttggcctggagatggtgatactaactacaatggaaagttcaagggtagagtcactatgactgctgacgaatccaccagcacagcctacatggaactcagcagcctgcgatctgaggacactgcggtctattactgtgcaagacgggagactacgacggtaggccgttattactatgctatggactactggggccaagggaccacggtcaccgtctcctccggaggtggtggatccgaggtgcagctggtcgagtctggaggaggattggtgcagcctggagggtcattgaaactctcatgtgcagcctctggattcaccttcaataagtacgccatgaactgggtccgccaggctccaggaaagggtttggaatgggttgctcgcataagaagtaaatataataattatgcaacatattatgccgattcagtgaaagacaggttcaccatctccagagatgattcaaaaaacactgcctatctacaaatgaacaacttgaaaactgaggacactgccgtgtactactgtgtgagacatgggaacttcggtaatagctacatatcctactgggcttactggggccaagggactctggtcaccgtctcctcaggtggtggtggttctggcggcggcggctccggtggtggtggttctcagactgttgtgactcaggaaccttcactcaccgtatcacctggtggaacagtcacactcacttgtggctcctcgactggggctgttacatctggcaactacccaaactgggtccaacaaaaaccaggtcaggcaccccgtggtctaataggtgggactaagttcctcgcccccggtactcctgccagattctcaggctccctgcttggaggcaaggctgccctcaccctctcaggggtacagccagaggatgaggcagaatattactgtgttctatggtacagcaaccgctgggtgttcggtggaggaaccaaactgactgtccta

SEQ ID NO: 1354 - protein, 124 aa, Artificial Sequence; identical to SEQ ID NO: 1298
  hCD19 4-E10-H

SEQ ID NO: 1355 - protein, 5 aa, Artificial Sequence
  hCD19 4-E10-HCDR1
SYWMN

SEQ ID NO: 1356 - protein, 17 aa, Artificial Sequence
  hCD19 4-E10-HCDR2
QIWPGDGDTNYNGKFKG

SEQ ID NO: 1357 - protein, 15 aa, Artificial Sequence
  hCD19 4-E10-HCDR3
RETTTVGRYYYAMDY

SEQ ID NO: 1358 - DNA, 372 bp, Artificial Sequence; identical to SEQ ID NO: 1302
  hCD19 4-E10-H

SEQ ID NO: 1359 - protein, 111 aa, Artificial Sequence
  hCD19 4-E10-L
DIQMTQSPSSLSASVGDRVTITCKASQSVDYDGTSYLNWYQQKPGQAPKLLIYDASNLVSGVPSRFSGSGSGTDFTLNISSVQPEDVATYYCQQSTEDPWTFGQGTKVEIK

SEQ ID NO: 1360 - protein, 16 aa, Artificial Sequence
  hCD19 4-E10-LCDR1
RSSKSLLHSNGNTYLY

SEQ ID NO: 1361 - protein, 7 aa, Artificial Sequence
  hCD19 4-E10-LCDR2
RMSNLAS

SEQ ID NO: 1362 - protein, 9 aa, Artificial Sequence
  hCD19 4-E10-LCDR3
LQHLEYPYT

SEQ ID NO: 1363 - DNA, 333 bp, Artificial Sequence
  hCD19 4-E10-L
gacatccagatgacccagtctccatcttctttgtctgcgtctgtaggggacagagtcaccatcacctgcaaggccagccaaagtgttgattatgatggtacgagttatttgaactggtaccaacagaaaccaggacaggcacccaaactcctcatctatgatgcatccaatctagtttctggggtcccatccaggtttagtggcagtgggtctgggacagacttcaccctcaacatcagttctgtgcagccggaggatgtcgcaacctattactgtcagcaaagtactgaggatccgtggacgttcggtcaagggaccaaggtggagatcaaa

SEQ ID NO: 1364 - protein, 250 aa, Artificial Sequence
  hCD19 4-E10-LH
DIQMTQSPSSLSASVGDRVTITCKASQSVDYDGTSYLNWYQQKPGQAPKLLIYDASNLVSGVPSRFSGSGSGTDFTLNISSVQPEDVATYYCQQSTEDPWTFGQGTKVEIKGGGGSGGGGSGGGGSQVQLVQSGAEVVKPGASVKISCKASGYAFTSYWMNWVRQRPGQGLEWIGQIWPGDGDTNYNGKFKGRVTMTADESTSTAYMELSSLRSEDTAVYYCARRETTTVGRYYYAMDYWGQGTTVTVSS

SEQ ID NO: 1365 - DNA, 750 bp, Artificial Sequence
  hCD19 4-E10-LH
gacatccagatgacccagtctccatcttctttgtctgcgtctgtaggggacagagtcaccatcacctgcaaggccagccaaagtgttgattatgatggtacgagttatttgaactggtaccaacagaaaccaggacaggcacccaaactcctcatctatgatgcatccaatctagtttctggggtcccatccaggtttagtggcagtgggtctgggacagacttcaccctcaacatcagttctgtgcagccggaggatgtcgcaacctattactgtcagcaaagtactgaggatccgtggacgttcggtcaagggaccaaggtggagatcaaaggtggtggtggttctggcggcggcggctccggtggtggtggttctcaggtgcagctggtccagtctggggctgaggtggtgaagcctggggcctcagtgaagatttcctgcaaggcttctggctatgcattcactagctactggatgaactgggtgaggcagcgccctggacagggtcttgagtggattggacagatttggcctggagatggtgatactaactacaatggaaagttcaagggtagagtcactatgactgctgacgaatccaccagcacagcctacatggaactcagcagcctgcgatctgaggacactgcggtctattactgtgcaagacgggagactacgacggtaggccgttattactatgctatggactactggggccaagggaccacggtcaccgtctcctca

SEQ ID NO: 1366 - protein, 504 aa, Artificial Sequence
  hCD19 4-E10 LH x I2C HL
DIQMTQSPSSLSASVGDRVTITCKASQSVDYDGTSYLNWYQQKPGQAPKLLIYDASNLVSGVPSRFSGSGSGTDFTLNISSVQPEDVATYYCQQSTEDPWTFGQGTKVEIKGGGGSGGGGSGGGGSQVQLVQSGAEVVKPGASVKISCKASGYAFTSYWMNWVRQRPGQGLEWIGQIWPGDGDTNYNGKFKGRVTMTADESTSTAYMELSSLRSEDTAVYYCARRETTTVGRYYYAMDYWGQGTTVTVSSGGGGSEVQLVESGGGLVQPGGSLKLSCAASGFTFNKYAMNWVRQAPGKGLEWVARIRSKYNNYATYYADSVKDRFTISRDDSKNTAYLQMNNLKTEDTAVYYCVRHGNFGNSYISYWAYWGQGTLVTVSSGGGGSGGGGSGGGGSQTVVTQEPSLTVSPGGTVTLTCGSSTGAVTSGNYPNWVQQKPGQAPRGLIGGTKFLAPGTPARFSGSLLGGKAALTLSGVQPEDEAEYYCVLWYSNRWVFGGGTKLTVL

SEQ ID NO: 1367 - DNA, 1512 bp, Artificial Sequence
  hCD19 4-E10 LH x I2C HL
gacatccagatgacccagtctccatcttctttgtctgcgtctgtaggggacagagtcaccatcacctgcaaggccagccaaagtgttgattatgatggtacgagttatttgaactggtaccaacagaaaccaggacaggcacccaaactcctcatctatgatgcatccaatctagtttctggggtcccatccaggtttagtggcagtgggtctgggacagacttcaccctcaacatcagttctgtgcagccggaggatgtcgcaacctattactgtcagcaaagtactgaggatccgtggacgttcggtcaagggaccaaggtggagatcaaaggtggtggtggttctggcggcggcggctccggtggtggtggttctcaggtgcagctggtccagtctggggctgaggtggtgaagcctggggcctcagtgaagatttcctgcaaggcttctggctatgcattcactagctactggatgaactgggtgaggcagcgccctggacagggtcttgagtggattggacagatttggcctggagatggtgatactaactacaatggaaagttcaagggtagagtcactatgactgctgacgaatccaccagcacagcctacatggaactcagcagcctgcgatctgaggacactgcggtctattactgtgcaagacgggagactacgacggtaggccgttattactatgctatggactactggggccaagggaccacggtcaccgtctcctccggaggtggtggatccgaggtgcagctggtcgagtctggaggaggattggtgcagcctggagggtcattgaaactctcatgtgcagcctctggattcaccttcaataagtacgccatgaactgggtccgccaggctccaggaaagggtttggaatgggttgctcgcataagaagtaaatataataattatgcaacatattatgccgattcagtgaaagacaggttcaccatctccagagatgattcaaaaaacactgcctatctacaaatgaacaacttgaaaactgaggacactgccgtgtactactgtgtgagacatgggaacttcggtaatagctacatatcctactgggcttactggggccaagggactctggtcaccgtctcctcaggtggtggtggttctggcggcggcggctccggtggtggtggttctcagactgttgtgactcaggaaccttcactcaccgtatcacctggtggaacagtcacactcacttgtggctcctcgactggggctgttacatctggcaactacccaaactgggtccaacaaaaaccaggtcaggcaccccgtggtctaataggtgggactaagttcctcgcccccggtactcctgccagattctcaggctccctgcttggaggcaaggctgccctcaccctctcaggggtacagccagaggatgaggcagaatattactgtgttctatggtacagcaaccgctgggtgttcggtggaggaaccaaactgactgtccta

SEQ ID NO: 1368 - protein, 124 aa, Artificial Sequence; identical to SEQ ID NO: 1298
  hCD19 4-E3-H

SEQ ID NO: 1369 - protein, 5 aa, Artificial Sequence
  hCD19 4-E3-HCDR1
SYWMN

SEQ ID NO: 1370 - protein, 17 aa, Artificial Sequence
  hCD19 4-E3-HCDR2
QIWPGDGDTNYNGKFKG

SEQ ID NO: 1371 - protein, 15 aa, Artificial Sequence
  hCD19 4-E3-HCDR3
RETTTVGRYYYAMDY

SEQ ID NO: 1372 - DNA, 372 bp, Artificial Sequence; identical to SEQ ID NO: 1302
  hCD19 4-E3-H

SEQ ID NO: 1373 - protein, 111 aa, Artificial Sequence
  hCD19 4-E3-L
DIQMTQSPSSLAASVGERVTITCKASQSVDYDGTSYLNWYQQKPGKAPKLLIYDASNLVSGVPSRFSGSGSGTDFTLTINSLEKEDFATYYCQQSTEDPWTFGQGTKVEIK

SEQ ID NO: 1374 - protein, 16 aa, Artificial Sequence
  hCD19 4-E3-LCDR1
RSSKSLLHSNGNTYLY

SEQ ID NO: 1375 - protein, 7 aa, Artificial Sequence
  hCD19 4-E3-LCDR2
RMSNLAS

SEQ ID NO: 1376 - protein, 9 aa, Artificial Sequence
  hCD19 4-E3-LCDR3
LQHLEYPYT

SEQ ID NO: 1377 - DNA, 333 bp, Artificial Sequence
  hCD19 4-E3-L
gacatccagatgacccagtctccatcttctttggctgcgtctgtaggggagagagtcaccatcacctgcaaggccagccaaagtgttgattatgatggtacgagttatttgaactggtaccaacagaaaccaggaaaggcacccaaactcctcatctatgatgcatccaatctagtttctggggtcccatccaggtttagtggcagtgggtctgggacagacttcaccctcaccatcaattctctggagaaggaggatttcgcaacctattactgtcagcaaagtactgaggatccgtggacgttcggtcaagggaccaaggtggagatcaaa

SEQ ID NO: 1378 - protein, 250 aa, Artificial Sequence
  hCD19 4-E3-LH
DIQMTQSPSSLAASVGERVTITCKASQSVDYDGTSYLNWYQQKPGKAPKLLIYDASNLVSGVPSRFSGSGSGTDFTLTINSLEKEDFATYYCQQSTEDPWTFGQGTKVEIKGGGGSGGGGSGGGGSQVQLVQSGAEVVKPGASVKISCKASGYAFTSYWMNWVRQRPGQGLEWIGQIWPGDGDTNYNGKFKGRVTMTADESTSTAYMELSSLRSEDTAVYYCARRETTTVGRYYYAMDYWGQGTTVTVSS

SEQ ID NO: 1379 - DNA, 750 bp, Artificial Sequence
  hCD19 4-E3-LH
gacatccagatgacccagtctccatcttctttggctgcgtctgtaggggagagagtcaccatcacctgcaaggccagccaaagtgttgattatgatggtacgagttatttgaactggtaccaacagaaaccaggaaaggcacccaaactcctcatctatgatgcatccaatctagtttctggggtcccatccaggtttagtggcagtgggtctgggacagacttcaccctcaccatcaattctctggagaaggaggatttcgcaacctattactgtcagcaaagtactgaggatccgtggacgttcggtcaagggaccaaggtggagatcaaaggtggtggtggttctggcggcggcggctccggtggtggtggttctcaggtgcagctggtccagtctggggctgaggtggtgaagcctggggcctcagtgaagatttcctgcaaggcttctggctatgcattcactagctactggatgaactgggtgaggcagcgccctggacagggtcttgagtggattggacagatttggcctggagatggtgatactaactacaatggaaagttcaagggtagagtcactatgactgctgacgaatccaccagcacagcctacatggaactcagcagcctgcgatctgaggacactgcggtctattactgtgcaagacgggagactacgacggtaggccgttattactatgctatggactactggggccaagggaccacggtcaccgtctcctca

SEQ ID NO: 1380 - protein, 504 aa, Artificial Sequence
  hCD19 4-E3 LH  X I2C HL
DIQMTQSPSSLAASVGERVTITCKASQSVDYDGTSYLNWYQQKPGKAPKLLIYDASNLVSGVPSRFSGSGSGTDFTLTINSLEKEDFATYYCQQSTEDPWTFGQGTKVEIKGGGGSGGGGSGGGGSQVQLVQSGAEVVKPGASVKISCKASGYAFTSYWMNWVRQRPGQGLEWIGQIWPGDGDTNYNGKFKGRVTMTADESTSTAYMELSSLRSEDTAVYYCARRETTTVGRYYYAMDYWGQGTTVTVSSGGGGSEVQLVESGGGLVQPGGSLKLSCAASGFTFNKYAMNWVRQAPGKGLEWVARIRSKYNNYATYYADSVKDRFTISRDDSKNTAYLQMNNLKTEDTAVYYCVRHGNFGNSYISYWAYWGQGTLVTVSSGGGGSGGGGSGGGGSQTVVTQEPSLTVSPGGTVTLTCGSSTGAVTSGNYPNWVQQKPGQAPRGLIGGTKFLAPGTPARFSGSLLGGKAALTLSGVQPEDEAEYYCVLWYSNRWVFGGGTKLTVL

SEQ ID NO: 1381 - DNA, 1512 bp, Artificial Sequence
  hCD19 4-E3 LH  X I2C HL
gacatccagatgacccagtctccatcttctttggctgcgtctgtaggggagagagtcaccatcacctgcaaggccagccaaagtgttgattatgatggtacgagttatttgaactggtaccaacagaaaccaggaaaggcacccaaactcctcatctatgatgcatccaatctagtttctggggtcccatccaggtttagtggcagtgggtctgggacagacttcaccctcaccatcaattctctggagaaggaggatttcgcaacctattactgtcagcaaagtactgaggatccgtggacgttcggtcaagggaccaaggtggagatcaaaggtggtggtggttctggcggcggcggctccggtggtggtggttctcaggtgcagctggtccagtctggggctgaggtggtgaagcctggggcctcagtgaagatttcctgcaaggcttctggctatgcattcactagctactggatgaactgggtgaggcagcgccctggacagggtcttgagtggattggacagatttggcctggagatggtgatactaactacaatggaaagttcaagggtagagtcactatgactgctgacgaatccaccagcacagcctacatggaactcagcagcctgcgatctgaggacactgcggtctattactgtgcaagacgggagactacgacggtaggccgttattactatgctatggactactggggccaagggaccacggtcaccgtctcctccggaggtggtggatccgaggtgcagctggtcgagtctggaggaggattggtgcagcctggagggtcattgaaactctcatgtgcagcctctggattcaccttcaataagtacgccatgaactgggtccgccaggctccaggaaagggtttggaatgggttgctcgcataagaagtaaatataataattatgcaacatattatgccgattcagtgaaagacaggttcaccatctccagagatgattcaaaaaacactgcctatctacaaatgaacaacttgaaaactgaggacactgccgtgtactactgtgtgagacatgggaacttcggtaatagctacatatcctactgggcttactggggccaagggactctggtcaccgtctcctcaggtggtggtggttctggcggcggcggctccggtggtggtggttctcagactgttgtgactcaggaaccttcactcaccgtatcacctggtggaacagtcacactcacttgtggctcctcgactggggctgttacatctggcaactacccaaactgggtccaacaaaaaccaggtcaggcaccccgtggtctaataggtgggactaagttcctcgcccccggtactcctgccagattctcaggctccctgcttggaggcaaggctgccctcaccctctcaggggtacagccagaggatgaggcagaatattactgtgttctatggtacagcaaccgctgggtgttcggtggaggaaccaaactgactgtccta

SEQ ID NO: 1382 - protein, 124 aa, Artificial Sequence; identical to SEQ ID NO: 1298
  hCD19 3-H7 -H

SEQ ID NO: 1383 - protein, 5 aa, Artificial Sequence
  hCD19 3-H7 -HCDR1
SYWMN

SEQ ID NO: 1384 - protein, 17 aa, Artificial Sequence
  hCD19 3-H7 -HCDR2
QIWPGDGDTNYNGKFKG

SEQ ID NO: 1385 - protein, 15 aa, Artificial Sequence
  hCD19 3-H7 -HCDR3
RETTTVGRYYYAMDY

SEQ ID NO: 1386 - DNA, 372 bp, Artificial Sequence; identical to SEQ ID NO: 1302
  hCD19 3-H7 -H

SEQ ID NO: 1387 - protein, 111 aa, Artificial Sequence
  hCD19 3-H7 -L
DIQMTQSPSSLSASVGDRVTITCKASQSVDYDGTSYLNWYQQKPGKAPKLLIYDASNLVSGVPSRFSGSGSGTDFTLNISSLQPEDVATYYCQQSTEDPWTFGQGTKVEIK

SEQ ID NO: 1388 - protein, 16 aa, Artificial Sequence
  hCD19 3-H7 -LCDR1
RSSKSLLHSNGNTYLY

SEQ ID NO: 1389 - protein, 7 aa, Artificial Sequence
  hCD19 3-H7 -LCDR2
RMSNLAS

SEQ ID NO: 1390 - protein, 9 aa, Artificial Sequence
  hCD19 3-H7 -LCDR3
LQHLEYPYT

SEQ ID NO: 1391 - DNA, 333 bp, Artificial Sequence
  hCD19 3-H7 -L
gacatccagatgacccagtctccatcttctttgtctgcgtctgtaggggacagagtcaccatcacctgcaaggccagccaaagtgttgattatgatggtacgagttatttgaactggtaccaacagaaaccaggaaaggcacccaaactcctcatctatgatgcatccaatctagtttctggggtcccatccaggtttagtggcagtgggtctgggacagacttcaccctcaacatcagttctctgcagccggaggatgtcgcaacctattactgtcagcaaagtactgaggatccgtggacgttcggtcaagggaccaaggtggagatcaaa

SEQ ID NO: 1392 - protein, 250 aa, Artificial Sequence
  hCD19 3-H7 -LH
DIQMTQSPSSLSASVGDRVTITCKASQSVDYDGTSYLNWYQQKPGKAPKLLIYDASNLVSGVPSRFSGSGSGTDFTLNISSLQPEDVATYYCQQSTEDPWTFGQGTKVEIKGGGGSGGGGSGGGGSQVQLVQSGAEVVKPGASVKISCKASGYAFTSYWMNWVRQRPGQGLEWIGQIWPGDGDTNYNGKFKGRVTMTADESTSTAYMELSSLRSEDTAVYYCARRETTTVGRYYYAMDYWGQGTTVTVSS

SEQ ID NO: 1393 - DNA, 750 bp, Artificial Sequence
  hCD19 3-H7 -LH
gacatccagatgacccagtctccatcttctttgtctgcgtctgtaggggacagagtcaccatcacctgcaaggccagccaaagtgttgattatgatggtacgagttatttgaactggtaccaacagaaaccaggaaaggcacccaaactcctcatctatgatgcatccaatctagtttctggggtcccatccaggtttagtggcagtgggtctgggacagacttcaccctcaacatcagttctctgcagccggaggatgtcgcaacctattactgtcagcaaagtactgaggatccgtggacgttcggtcaagggaccaaggtggagatcaaaggtggtggtggttctggcggcggcggctccggtggtggtggttctcaggtgcagctggtccagtctggggctgaggtggtgaagcctggggcctcagtgaagatttcctgcaaggcttctggctatgcattcactagctactggatgaactgggtgaggcagcgccctggacagggtcttgagtggattggacagatttggcctggagatggtgatactaactacaatggaaagttcaagggtagagtcactatgactgctgacgaatccaccagcacagcctacatggaactcagcagcctgcgatctgaggacactgcggtctattactgtgcaagacgggagactacgacggtaggccgttattactatgctatggactactggggccaagggaccacggtcaccgtctcctca

SEQ ID NO: 1394 - protein, 504 aa, Artificial Sequence
  hCD19 3-H7 LH  X I2C HL
DIQMTQSPSSLSASVGDRVTITCKASQSVDYDGTSYLNWYQQKPGKAPKLLIYDASNLVSGVPSRFSGSGSGTDFTLNISSLQPEDVATYYCQQSTEDPWTFGQGTKVEIKGGGGSGGGGSGGGGSQVQLVQSGAEVVKPGASVKISCKASGYAFTSYWMNWVRQRPGQGLEWIGQIWPGDGDTNYNGKFKGRVTMTADESTSTAYMELSSLRSEDTAVYYCARRETTTVGRYYYAMDYWGQGTTVTVSSGGGGSEVQLVESGGGLVQPGGSLKLSCAASGFTFNKYAMNWVRQAPGKGLEWVARIRSKYNNYATYYADSVKDRFTISRDDSKNTAYLQMNNLKTEDTAVYYCVRHGNFGNSYISYWAYWGQGTLVTVSSGGGGSGGGGSGGGGSQTVVTQEPSLTVSPGGTVTLTCGSSTGAVTSGNYPNWVQQKPGQAPRGLIGGTKFLAPGTPARFSGSLLGGKAALTLSGVQPEDEAEYYCVLWYSNRWVFGGGTKLTVL

SEQ ID NO: 1395 - DNA, 1512 bp, Artificial Sequence
  hCD19 3-H7 LH  X I2C HL
gacatccagatgacccagtctccatcttctttgtctgcgtctgtaggggacagagtcaccatcacctgcaaggccagccaaagtgttgattatgatggtacgagttatttgaactggtaccaacagaaaccaggaaaggcacccaaactcctcatctatgatgcatccaatctagtttctggggtcccatccaggtttagtggcagtgggtctgggacagacttcaccctcaacatcagttctctgcagccggaggatgtcgcaacctattactgtcagcaaagtactgaggatccgtggacgttcggtcaagggaccaaggtggagatcaaaggtggtggtggttctggcggcggcggctccggtggtggtggttctcaggtgcagctggtccagtctggggctgaggtggtgaagcctggggcctcagtgaagatttcctgcaaggcttctggctatgcattcactagctactggatgaactgggtgaggcagcgccctggacagggtcttgagtggattggacagatttggcctggagatggtgatactaactacaatggaaagttcaagggtagagtcactatgactgctgacgaatccaccagcacagcctacatggaactcagcagcctgcgatctgaggacactgcggtctattactgtgcaagacgggagactacgacggtaggccgttattactatgctatggactactggggccaagggaccacggtcaccgtctcctccggaggtggtggatccgaggtgcagctggtcgagtctggaggaggattggtgcagcctggagggtcattgaaactctcatgtgcagcctctggattcaccttcaataagtacgccatgaactgggtccgccaggctccaggaaagggtttggaatgggttgctcgcataagaagtaaatataataattatgcaacatattatgccgattcagtgaaagacaggttcaccatctccagagatgattcaaaaaacactgcctatctacaaatgaacaacttgaaaactgaggacactgccgtgtactactgtgtgagacatgggaacttcggtaatagctacatatcctactgggcttactggggccaagggactctggtcaccgtctcctcaggtggtggtggttctggcggcggcggctccggtggtggtggttctcagactgttgtgactcaggaaccttcactcaccgtatcacctggtggaacagtcacactcacttgtggctcctcgactggggctgttacatctggcaactacccaaactgggtccaacaaaaaccaggtcaggcaccccgtggtctaataggtgggactaagttcctcgcccccggtactcctgccagattctcaggctccctgcttggaggcaaggctgccctcaccctctcaggggtacagccagaggatgaggcagaatattactgtgttctatggtacagcaaccgctgggtgttcggtggaggaaccaaactgactgtccta

SEQ ID NO: 1396 - DNA, 2952 bp, Artificial Sequence
  cMET-1
atgggatggagctgtatcatcctcttcttggtagcaacagctacaggtgtacactccgagtgtaaagaggcactagcaaagtccgagatgaatgtgaatatgaagtatcagcttcccaacttcaccgcggaaacacccatccagaatgtcattctacatgagcatcacattttccttggtgccactaactacatttatgttttaaatgaggaagaccttcagaaggttgctgagtacaagactgggcctgtgctggaacacccagattgtttcccatgtcaggactgcagcagcaaagccaatttatcaggaggtgtttggaaagataacatcaacatggctctagttgtggacacctactatgatgatcaactcattagctgtggcagcgtcaacagagggacctgccagcgacatgtctttccccacaatcatactgctgacatacagtcggaggttcactgcatattctccccacagatagaagagcccagccagtgtcctgactgtgtggtgagcgccctgggagccaaagtcctttcatctgtaaaggaccggttcatcaacttctttgtaggcaataccataaattcttcttatttcccagatcatccattgcattcgatatcagtgagaaggctaaaggaaacgaaagatggttttatgtttttgacggaccagtcctacattgatgttttacctgagttcagagattcttaccccattaagtatgtccatgcctttgaaagcaacaattttatttacttcttgacggtccaaagggaaactctagatgctcagacttttcacacaagaataatcaggttctgttccataaactctggattgcattcctacatggaaatgcctctggagtgtattctcacagaaaagagaaaaaagagatccacaaagaaggaagtgtttaatatacttcaggctgcgtatgtcagcaagcctggggcccagcttgctagacaaataggagccagcctgaatgatgacattcttttcggggtgttcgcacaaagcaagccagattctgccgaaccaatggatcgatctgccatgtgtgcattccctatcaaatatgtcaacgacttcttcaacaagatcgtcaacaaaaacaatgtgagatgtctccagcatttttacggacccaatcatgagcactgctttaataggacacttctgagaaattcatcaggctgtgaagcgcgccgtgatgaatatcgaacagagtttaccacagctttgcagcgcgttgacttattcatgggtcaattcagcgaagtcctcttaacatctatatccaccttcattaaaggagacctcaccatagctaatcttgggacatcagagggtcgcttcatgcaggttgtggtttctcgatcaggaccatcaacccctcatgtgaattttctcctggactcccatccagtgtctccagaagtgattgtggagcatacattaaaccaaaatggctacacactggttatcactgggaagaagatcacgaagatcccattgaatggcttgggctgcagacatttccagtcctgcagtcaatgcctctctgccccaccctttgttcagtgtggctggtgccacgacaaatgtgtgcgatcggaggaatgcctgagcgggacatggactcaacagatctgtctgcctgcaatctacaaggttttcccaaatagtgcaccccttgaaggagggacaaggctgaccatatgtggctgggactttggatttcggaggaataataaatttgatttaaagaaaactagagttctccttggaaatgagagctgcaccttgactttaagtgagagcacgatgaatacattgaaatgcacagttggtcctgccatgaataagcatttcaatatgtccataattatttcaaatggccacgggacaacacaatacagtacattctcctatgtggatcctgtaataacaagtatttcgccgaaatacggtcctatggctggtggcactttacttactttaactggaaattacctaaacagtgggaatagcagacacatttcaattggtggaaaaacatgtactttaaaaagtgtgtcaaacagtattcttgaatgttataccccagcccaaaccatttcaactgagtttgctgttaaattgaaaattgacttagccaaccgagagacaagcatcttcagttaccgtgaagatcccattgtctatgaaattcatccaaccaaatcttttattagtggtgggagcacaataacaggtgttgggaaaaacctgaactcagttagtgtcccgagaatggtcataaatgtgcatgaagcaggaaggaactttacagtggcatgtcaacatcgctctaattcagagataatctgttgtaccactccttccctgcaacagctgaatctgcaactccccctgaaaaccaaagcctttttcatgttagatgggatcctttccaaatactttgatctcatttatgtacataatcctgtgtttaagccttttgaaaagccagtgatgatctcaatgggcaatgaaaatgtactggaaattaagggaaatgatattgaccctgaagcagttaaaggtgaagtgttaaaagttggaaataagagctgtgagaatatacacttacattctgaagccgttttatgcacggtccccaatgacctgctgaaattgaacagcgagctaaatatagagtggaagcaagcaatttcttcaaccgtccttggaaaagtaatagttcaaccagatcagaatttcacatccggaggtggtggatccggggctggtgttattgctgttattgtggttgtggtgatagcaattgttgctggaattgttgtgctggttatttccagaaagaagagaatggcaaagtatgagaaggctgagataaaggagatgggtgagatgcatagggaactcaatgcataa

SEQ ID NO: 1397 - protein, 983 aa, Artificial Sequence
  cMET-2
MGWSCIILFLVATATGVHSECKEALAKSEMNVNMKYQLPNFTAETPIQNVILHEHHIFLGATNYIYVLNEEDLQKVAEYKTGPVLEHPDCFPCQDCSSKANLSGGVWKDNINMALVVDTYYDDQLISCGSVNRGTCQRHVFPHNHTADIQSEVHCIFSPQIEEPSQCPDCVVSALGAKVLSSVKDRFINFFVGNTINSSYFPDHPLHSISVRRLKETKDGFMFLTDQSYIDVLPEFRDSYPIKYVHAFESNNFIYFLTVQRETLDAQTFHTRIIRFCSINSGLHSYMEMPLECILTEKRKKRSTKKEVFNILQAAYVSKPGAQLARQIGASLNDDILFGVFAQSKPDSAEPMDRSAMCAFPIKYVNDFFNKIVNKNNVRCLQHFYGPNHEHCFNRTLLRNSSGCEARRDEYRTEFTTALQRVDLFMGQFSEVLLTSISTFIKGDLTIANLGTSEGRFMQVVVSRSGPSTPHVNFLLDSHPVSPEVIVEHTLNQNGYTLVITGKKITKIPLNGLGCRHFQSCSQCLSAPPFVQCGWCHDKCVRSEECLSGTWTQQICLPAIYKVFPNSAPLEGGTRLTICGWDFGFRRNNKFDLKKTRVLLGNESCTLTLSESTMNTLKCTVGPAMNKHFNMSIIISNGHGTTQYSTFSYVDPVITSISPKYGPMAGGTLLTLTGNYLNSGNSRHISIGGKTCTLKSVSNSILECYTPAQTISTEFAVKLKIDLANRETSIFSYREDPIVYEIHPTKSFISGGSTITGVGKNLNSVSVPRMVINVHEAGRNFTVACQHRSNSEIICCTTPSLQQLNLQLPLKTKAFFMLDGILSKYFDLIYVHNPVFKPFEKPVMISMGNENVLEIKGNDIDPEAVKGEVLKVGNKSCENIHLHSEAVLCTVPNDLLKLNSELNIEWKQAISSTVLGKVIVQPDQNFTSGGGGSGAGVIAVIVVVVIAIVAGIVVLVISRKKRMAKYEKAEIKEMGEMHRELNA

SEQ ID NO: 1398 - DNA, 2952 bp, Artificial Sequence
  cMET-3
atgggatggagctgtatcatcctcttcttggtagcaacagctacaggtgtacactccgagtgtaaagaggcactagcaaagtccgagatgaatgtgaatatgaagtatcagcttcccaacttcaccgcggaaacagccatccagaatgtcattctacatgagcatcacattttcctcggtgccaccaactacatttatgttttaaatgaggaagaccttcagaaggttgctgagtacaagaccgggcctgtgctggaacacccagattgtttcccgtgtcaggactgcagcagcaaagccaatttatcaggaggcgtttggaaagataacatcaacatggctctggttgtggacacctactatgatgatcaactcattagctgtggcagcgtcaacagagggacctgccagcgacatgtctttccccataatcatactgctgacatacagtcggaggttcactgcatattctccccacagatagaagagcccaaccagtgccctgactgtgtggtgagcgccctgggagccaaagtcctttcatctgtaaaggaccggttcatcaacttctttgtaggcaataccataaattcttcttatttcccacatcatccgttgcattcgatatcagtgagaaggctaaaggaaacgaaagatggttttatgtttttgacagaccagtcctacattgatgttttacctgagttcagagattcttaccccattaagtacatccacgcttttgaaagcaacaattttatttacttcttgacggtccaaagggaaactctaaatgctcagacttttcacacaagaataatcaggttctgttccttaaactctggattgcactcctacatggaaatgcctctagagtgtattctcacagaaaagagaaaaaagagatccacaaagaaggaagtgtttaatatccttcaggctgcatatgtcagcaagcccggggcccagcttgctagacaaataggagccagcctgaatgatgacattctctttggggtgttcgcacaaagcaagccagattctgccgaaccaatggatcgatctgcaatgtgtgcatttcctatcaaatatgtcaacgacttcttcaacaagatcgtcaacaaaaacaatgtgagatgtctccagcatttttatggacccaatcatgagcactgttttaataggacacttctgagaaattcatcaggctgtgaagcgcgccgtgatgaatatcgagcagagtttaccacagctttgcagcgggttgacttattcatgggtcaattcagcgaagtcctcttaacatctatatccaccttcgtgaaaggagacctcaccatcgctaatcttgggacatcagagggtcgcttcatgcaggttgtggtttctcgatcaggaccatcaacccctcatgtgaattttctcctggactctcacccggtgtctccagaagtgattgtggagcatccattaaaccagaatggctacacactggttgtcacggggaagaagatcaccaagatcccattgaatggcttgggctgcagacatttccagtcctgcagtcagtgcctctctgccccaccctttgtgcagtgtggctggtgccacgacaaatgtgtgcgatcggaggaatgccccagtgggacatggactcaacagatctgtctgcctgcaatctacaaggttttcccaactagtgcaccccttgaaggagggacaaggctgaccatatgtggctgggactttggatttcggaggaataataaatttgatttaaagaaaactagagttctccttggaaatgagagctgcaccttgactttaagtgagagcacgatgaatacattgaaatgcacagttggtcctgccatgaataaacatttcaatatgtccataattatttcaaatggccacgggacaacacaatacagtacattttcctatgtggatcctataataacaagtatttcgccaaaatatggccctatggctggtggcactttacttactttaactggaaattacctaaacagtggcaattctagacacatttcaattggtggaaaaacatgtactttaaaaagtgtgtcaaacagtattctcgaatgttataccccagcccaaaccatttcaactgagtttgctgttaaattgaaaattgacttagccaaccgagagacaagcatcttcagttaccgggaagaccccattgtctatgaaattcatccaaccaaatcttttattagtggtgggagcacaataacaggtgttgggaaaaacctgcattcagttagtgtcccgaggatggtcataaatgtgcatgaagcaggaaggaactttacagtggcatgtcagcatcgctctaattcagagataatctgctgtaccactccttccctgcaacagctgaatctgcaactccccctgaaaaccaaagcctttttcatgttagatgggatcctttccaaatactttgatctcatttatgtacataatcctgtgtttaagccttttgaaaagccagtaatgatctcaatgggcaatgaaaatgtactggaaattaagggaaatgatattgaccctgaagcagttaaaggtgaagtgttaaaagttggaaataagagctgtgagaatatacacttacattctgaagccgttttatgcacggtccccaatgacctgctgaaattgaacagcgagctaaatatagagtggaagcaagcaatttcttcaaccgtccttggaaaagtaatagttcaaccagatcagaatttcacctccggaggtggtggatccggggctggtgttattgctgttattgtggttgtggtgatagcaattgttgctggaattgttgtgctggttatttccagaaagaagagaatggcaaagtatgagaaggctgagataaaggagatgggtgagatgcatagggaactcaatgcataa

SEQ ID NO: 1399 - protein, 983 aa, Artificial Sequence
  cMET-4
MGWSCIILFLVATATGVHSECKEALAKSEMNVNMKYQLPNFTAETAIQNVILHEHHIFLGATNYIYVLNEEDLQKVAEYKTGPVLEHPDCFPCQDCSSKANLSGGVWKDNINMALVVDTYYDDQLISCGSVNRGTCQRHVFPHNHTADIQSEVHCIFSPQIEEPNQCPDCVVSALGAKVLSSVKDRFINFFVGNTINSSYFPHHPLHSISVRRLKETKDGFMFLTDQSYIDVLPEFRDSYPIKYIHAFESNNFIYFLTVQRETLNAQTFHTRIIRFCSLNSGLHSYMEMPLECILTEKRKKRSTKKEVFNILQAAYVSKPGAQLARQIGASLNDDILFGVFAQSKPDSAEPMDRSAMCAFPIKYVNDFFNKIVNKNNVRCLQHFYGPNHEHCFNRTLLRNSSGCEARRDEYRAEFTTALQRVDLFMGQFSEVLLTSISTFVKGDLTIANLGTSEGRFMQVVVSRSGPSTPHVNFLLDSHPVSPEVIVEHPLNQNGYTLVVTGKKITKIPLNGLGCRHFQSCSQCLSAPPFVQCGWCHDKCVRSEECPSGTWTQQICLPAIYKVFPTSAPLEGGTRLTICGWDFGFRRNNKFDLKKTRVLLGNESCTLTLSESTMNTLKCTVGPAMNKHFNMSIIISNGHGTTQYSTFSYVDPIITSISPKYGPMAGGTLLTLTGNYLNSGNSRHISIGGKTCTLKSVSNSILECYTPAQTISTEFAVKLKIDLANRETSIFSYREDPIVYEIHPTKSFISGGSTITGVGKNLHSVSVPRMVINVHEAGRNFTVACQHRSNSEIICCTTPSLQQLNLQLPLKTKAFFMLDGILSKYFDLIYVHNPVFKPFEKPVMISMGNENVLEIKGNDIDPEAVKGEVLKVGNKSCENIHLHSEAVLCTVPNDLLKLNSELNIEWKQAISSTVLGKVIVQPDQNFTSGGGGSGAGVIAVIVVVVIAIVAGIVVLVISRKKRMAKYEKAEIKEMGEMHRELNA

SEQ ID NO: 1400 - protein, 119 aa, Artificial Sequence
  ME86H11-H
QVQLVQSGAEVKRPGASVKVSCRASGYTFTSYWLHWVRQGPGQRLEWIGMIDPSNSDTRFNPNFKDRATFTVDTSASTAYMELSSLTSEDTAVYYCATYGSYVSPLDYWGQGTSVTVSS

SEQ ID NO: 1401 - protein, 5 aa, Artificial Sequence
  ME86H11-HCDR1
SYWLH

SEQ ID NO: 1402 - protein, 17 aa, Artificial Sequence
  ME86H11-HCDR2
MIDPSNSDTRFNPNFKD

SEQ ID NO: 1403 - protein, 10 aa, Artificial Sequence
  ME86H11-HCDR3
YGSYVSPLDY

SEQ ID NO: 1404 - DNA, 357 bp, Artificial Sequence
  ME86H11-H
caggtgcagctggtccagtctggggctgaagtgaagaggcctggggcttcagtgaaagtgtcctgcagggcttcgggctataccttcaccagctactggttgcactgggttagacaggggcctggacaaaggcttgagtggataggcatgattgatccttccaatagtgacactaggtttaatccgaacttcaaggacagggccacattcactgtagacacatctgccagcacagcctacatggagctcagcagcctgacatctgaggacactgcagtctattactgtgccacatatggtagctacgtttcccctctggactactggggtcaaggaacctcggtcaccgtctcctca

SEQ ID NO: 1405 - protein, 113 aa, Artificial Sequence
  ME86H11-L
DIVMTQTPFSLPVTLGETVSISCKSSQSLLYTSSQKNYLAWYLQKPGQSPQLLIYWASTRESGVPDRFSGSGSGTDFTLKISRVEAEDVGVYYCQQYYAYPWTFGGGTKLEIK

SEQ ID NO: 1406 - protein, 17 aa, Artificial Sequence
  ME86H11-LCDR1
KSSQSLLYTSSQKNYLA

SEQ ID NO: 1407 - protein, 7 aa, Artificial Sequence
  ME86H11-LCDR2
WASTRES

SEQ ID NO: 1408 - protein, 9 aa, Artificial Sequence
  ME86H11-LCDR3
QQYYAYPWT

SEQ ID NO: 1409 - DNA, 339 bp, Artificial Sequence
  ME86H11-L
gacatcgtgatgacccagactccattctccctacctgtgacacttggagagacggtttctatcagctgcaagtccagtcagtcccttttatatactagcagtcagaagaactacttggcctggtacctgcagaaaccaggtcagtctcctcaactgctgatttactgggcatccactagggaatctggggtccctgatcgcttctcaggcagtggatctgggacagatttcactctcaaaatctccagagtggaggctgaggacgtgggagtttattactgtcagcaatattatgcctatccgtggacgttcggtggaggcacaaagttggagatcaaa

SEQ ID NO: 1410 - protein, 247 aa, Artificial Sequence
  ME86H11-HL
QVQLVQSGAEVKRPGASVKVSCRASGYTFTSYWLHWVRQGPGQRLEWIGMIDPSNSDTRFNPNFKDRATFTVDTSASTAYMELSSLTSEDTAVYYCATYGSYVSPLDYWGQGTSVTVSSGGGGSGGGGSGGGGSDIVMTQTPFSLPVTLGETVSISCKSSQSLLYTSSQKNYLAWYLQKPGQSPQLLIYWASTRESGVPDRFSGSGSGTDFTLKISRVEAEDVGVYYCQQYYAYPWTFGGGTKLEIK

SEQ ID NO: 1411 - DNA, 741 bp, Artificial Sequence
  ME86H11-HL
caggtgcagctggtccagtctggggctgaagtgaagaggcctggggcttcagtgaaagtgtcctgcagggcttcgggctataccttcaccagctactggttgcactgggttagacaggggcctggacaaaggcttgagtggataggcatgattgatccttccaatagtgacactaggtttaatccgaacttcaaggacagggccacattcactgtagacacatctgccagcacagcctacatggagctcagcagcctgacatctgaggacactgcagtctattactgtgccacatatggtagctacgtttcccctctggactactggggtcaaggaacctcggtcaccgtctcctcaggtggtggtggttctggcggcggcggctccggtggtggtggttctgacatcgtgatgacccagactccattctccctacctgtgacacttggagagacggtttctatcagctgcaagtccagtcagtcccttttatatactagcagtcagaagaactacttggcctggtacctgcagaaaccaggtcagtctcctcaactgctgatttactgggcatccactagggaatctggggtccctgatcgcttctcaggcagtggatctgggacagatttcactctcaaaatctccagagtggaggctgaggacgtgggagtttattactgtcagcaatattatgcctatccgtggacgttcggtggaggcacaaagttggagatcaaa

SEQ ID NO: 1412 - protein, 502 aa, Artificial Sequence
  ME86H11 HL x I2C HL
QVQLVQSGAEVKRPGASVKVSCRASGYTFTSYWLHWVRQGPGQRLEWIGMIDPSNSDTRFNPNFKDRATFTVDTSASTAYMELSSLTSEDTAVYYCATYGSYVSPLDYWGQGTSVTVSSGGGGSGGGGSGGGGSDIVMTQTPFSLPVTLGETVSISCKSSQSLLYTSSQKNYLAWYLQKPGQSPQLLIYWASTRESGVPDRFSGSGSGTDFTLKISRVEAEDVGVYYCQQYYAYPWTFGGGTKLEIKSGGGGSEVQLVESGGGLVQPGGSLKLSCAASGFTFNKYAMNWVRQAPGKGLEWVARIRSKYNNYATYYADSVKDRFTISRDDSKNTAYLQMNNLKTEDTAVYYCVRHGNFGNSYISYWAYWGQGTLVTVSSGGGGSGGGGSGGGGSQTVVTQEPSLTVSPGGTVTLTCGSSTGAVTSGNYPNWVQQKPGQAPRGLIGGTKFLAPGTPARFSGSLLGGKAALTLSGVQPEDEAEYYCVLWYSNRWVFGGGTKLTVL

SEQ ID NO: 1413 - DNA, 1506 bp, Artificial Sequence
  ME86H11 HL x I2C HL
caggtgcagctggtccagtctggggctgaagtgaagaggcctggggcttcagtgaaagtgtcctgcagggcttcgggctataccttcaccagctactggttgcactgggttagacaggggcctggacaaaggcttgagtggataggcatgattgatccttccaatagtgacactaggtttaatccgaacttcaaggacagggccacattcactgtagacacatctgccagcacagcctacatggagctcagcagcctgacatctgaggacactgcagtctattactgtgccacatatggtagctacgtttcccctctggactactggggtcaaggaacctcggtcaccgtctcctcaggtggtggtggttctggcggcggcggctccggtggtggtggttctgacatcgtgatgacccagactccattctccctacctgtgacacttggagagacggtttctatcagctgcaagtccagtcagtcccttttatatactagcagtcagaagaactacttggcctggtacctgcagaaaccaggtcagtctcctcaactgctgatttactgggcatccactagggaatctggggtccctgatcgcttctcaggcagtggatctgggacagatttcactctcaaaatctccagagtggaggctgaggacgtgggagtttattactgtcagcaatattatgcctatccgtggacgttcggtggaggcacaaagttggagatcaaatccggaggtggtggatccgaggtgcagctggtcgagtctggaggaggattggtgcagcctggagggtcattgaaactctcatgtgcagcctctggattcaccttcaataagtacgccatgaactgggtccgccaggctccaggaaagggtttggaatgggttgctcgcataagaagtaaatataataattatgcaacatattatgccgattcagtgaaagacaggttcaccatctccagagatgattcaaaaaacactgcctatctacaaatgaacaacttgaaaactgaggacactgccgtgtactactgtgtgagacatgggaacttcggtaatagctacatatcctactgggcttactggggccaagggactctggtcaccgtctcctcaggtggtggtggttctggcggcggcggctccggtggtggtggttctcagactgttgtgactcaggaaccttcactcaccgtatcacctggtggaacagtcacactcacttgtggctcctcgactggggctgttacatctggcaactacccaaactgggtccaacaaaaaccaggtcaggcaccccgtggtctaataggtgggactaagttcctcgcccccggtactcctgccagattctcaggctccctgcttggaggcaaggctgccctcaccctctcaggggtacagccagaggatgaggcagaatattactgtgttctatggtacagcaaccgctgggtgttcggtggaggaaccaaactgactgtccta

SEQ ID NO: 1414 - protein, 119 aa, Artificial Sequence
  ME62A12-H
QVQLVQSGAEVVKPGASVKVSCKASGYTFTSYWLHWVRQTPGQGLEWIGMIDPSNSDTRFNPNFKDKVTFTVDTSASTAYMELSSLRSEDTAVYYCATYGSYVSPLDYWGQGTSVTVSS

SEQ ID NO: 1415 - protein, 5 aa, Artificial Sequence
  ME62A12-HCDR1
SYWLH

SEQ ID NO: 1416 - protein, 17 aa, Artificial Sequence
  ME62A12-HCDR2
MIDPSNSDTRFNPNFKD

SEQ ID NO: 1417 - protein, 10 aa, Artificial Sequence
  ME62A12-HCDR3
YGSYVSPLDY

SEQ ID NO: 1418 - DNA, 357 bp, Artificial Sequence
  ME62A12-H
caggtgcagctggtccagtctggggctgaagtggtgaagcctggggcttcagtgaaagtgtcctgcaaggcttcgggctataccttcaccagctactggttgcactgggttagacagacgcctggacaagggcttgagtggataggcatgattgatccttccaatagtgacactaggtttaatccgaacttcaaggacaaggtcacattcactgtagacacatctgccagcacagcctacatggaactcagcagcctgagatctgaggacactgcagtctattactgtgccacatatggtagctacgtttcccctctggactactggggtcaaggaacctcggtcaccgtctcctca

SEQ ID NO: 1419 - protein, 113 aa, Artificial Sequence
  ME62A12-L
DIVMTQTPLSLPVTLGEKVSVSCKSSQSLLYTSSQKNYLAWYQQKPGQSPKLLIYWASTRESGVPDRFSGSGSGTDFTLTISRVEAEDLGVYYCQQYYAYPWTFGGGTKLEIK

SEQ ID NO: 1420 - protein, 17 aa, Artificial Sequence
  ME62A12-LCDR1
KSSQSLLYTSSQKNYLA

SEQ ID NO: 1421 - protein, 7 aa, Artificial Sequence
  ME62A12-LCDR2
WASTRES

SEQ ID NO: 1422 - protein, 9 aa, Artificial Sequence
  ME62A12-LCDR3
QQYYAYPWT

SEQ ID NO: 1423 - DNA, 339 bp, Artificial Sequence
  ME62A12-L
gacatcgtgatgacccagactccactctccctacctgtgacacttggagagaaggtttctgtcagctgcaagtccagtcagtcccttttatatactagcagtcagaagaactacttggcctggtaccagcagaaaccaggtcagtctcctaaactgctgatttactgggcatccactagggaatctggggtccctgatcgcttctcaggcagtggatctgggacagatttcactctcacaatctccagagtggaggctgaggacctgggagtttattactgtcagcaatattatgcctatccgtggacgttcggtggaggcacaaagttggagatcaaa

SEQ ID NO: 1424 - protein, 247 aa, Artificial Sequence
  ME62A12-HL
QVQLVQSGAEVVKPGASVKVSCKASGYTFTSYWLHWVRQTPGQGLEWIGMIDPSNSDTRFNPNFKDKVTFTVDTSASTAYMELSSLRSEDTAVYYCATYGSYVSPLDYWGQGTSVTVSSGGGGSGGGGSGGGGSDIVMTQTPLSLPVTLGEKVSVSCKSSQSLLYTSSQKNYLAWYQQKPGQSPKLLIYWASTRESGVPDRFSGSGSGTDFTLTISRVEAEDLGVYYCQQYYAYPWTFGGGTKLEIK

SEQ ID NO: 1425 - DNA, 741 bp, Artificial Sequence
  ME62A12-HL
caggtgcagctggtccagtctggggctgaagtggtgaagcctggggcttcagtgaaagtgtcctgcaaggcttcgggctataccttcaccagctactggttgcactgggttagacagacgcctggacaagggcttgagtggataggcatgattgatccttccaatagtgacactaggtttaatccgaacttcaaggacaaggtcacattcactgtagacacatctgccagcacagcctacatggaactcagcagcctgagatctgaggacactgcagtctattactgtgccacatatggtagctacgtttcccctctggactactggggtcaaggaacctcggtcaccgtctcctcaggtggtggtggttctggcggcggcggctccggtggtggtggttctgacatcgtgatgacccagactccactctccctacctgtgacacttggagagaaggtttctgtcagctgcaagtccagtcagtcccttttatatactagcagtcagaagaactacttggcctggtaccagcagaaaccaggtcagtctcctaaactgctgatttactgggcatccactagggaatctggggtccctgatcgcttctcaggcagtggatctgggacagatttcactctcacaatctccagagtggaggctgaggacctgggagtttattactgtcagcaatattatgcctatccgtggacgttcggtggaggcacaaagttggagatcaaa

SEQ ID NO: 1426 - protein, 502 aa, Artificial Sequence
  ME62A12 HL x I2C HL
QVQLVQSGAEVVKPGASVKVSCKASGYTFTSYWLHWVRQTPGQGLEWIGMIDPSNSDTRFNPNFKDKVTFTVDTSASTAYMELSSLRSEDTAVYYCATYGSYVSPLDYWGQGTSVTVSSGGGGSGGGGSGGGGSDIVMTQTPLSLPVTLGEKVSVSCKSSQSLLYTSSQKNYLAWYQQKPGQSPKLLIYWASTRESGVPDRFSGSGSGTDFTLTISRVEAEDLGVYYCQQYYAYPWTFGGGTKLEIKSGGGGSEVQLVESGGGLVQPGGSLKLSCAASGFTFNKYAMNWVRQAPGKGLEWVARIRSKYNNYATYYADSVKDRFTISRDDSKNTAYLQMNNLKTEDTAVYYCVRHGNFGNSYISYWAYWGQGTLVTVSSGGGGSGGGGSGGGGSQTVVTQEPSLTVSPGGTVTLTCGSSTGAVTSGNYPNWVQQKPGQAPRGLIGGTKFLAPGTPARFSGSLLGGKAALTLSGVQPEDEAEYYCVLWYSNRWVFGGGTKLTVL

SEQ ID NO: 1427 - DNA, 1506 bp, Artificial Sequence
  ME62A12 HL x I2C HL
caggtgcagctggtccagtctggggctgaagtggtgaagcctggggcttcagtgaaagtgtcctgcaaggcttcgggctataccttcaccagctactggttgcactgggttagacagacgcctggacaagggcttgagtggataggcatgattgatccttccaatagtgacactaggtttaatccgaacttcaaggacaaggtcacattcactgtagacacatctgccagcacagcctacatggaactcagcagcctgagatctgaggacactgcagtctattactgtgccacatatggtagctacgtttcccctctggactactggggtcaaggaacctcggtcaccgtctcctcaggtggtggtggttctggcggcggcggctccggtggtggtggttctgacatcgtgatgacccagactccactctccctacctgtgacacttggagagaaggtttctgtcagctgcaagtccagtcagtcccttttatatactagcagtcagaagaactacttggcctggtaccagcagaaaccaggtcagtctcctaaactgctgatttactgggcatccactagggaatctggggtccctgatcgcttctcaggcagtggatctgggacagatttcactctcacaatctccagagtggaggctgaggacctgggagtttattactgtcagcaatattatgcctatccgtggacgttcggtggaggcacaaagttggagatcaaatccggaggtggtggatccgaggtgcagctggtcgagtctggaggaggattggtgcagcctggagggtcattgaaactctcatgtgcagcctctggattcaccttcaataagtacgccatgaactgggtccgccaggctccaggaaagggtttggaatgggttgctcgcataagaagtaaatataataattatgcaacatattatgccgattcagtgaaagacaggttcaccatctccagagatgattcaaaaaacactgcctatctacaaatgaacaacttgaaaactgaggacactgccgtgtactactgtgtgagacatgggaacttcggtaatagctacatatcctactgggcttactggggccaagggactctggtcaccgtctcctcaggtggtggtggttctggcggcggcggctccggtggtggtggttctcagactgttgtgactcaggaaccttcactcaccgtatcacctggtggaacagtcacactcacttgtggctcctcgactggggctgttacatctggcaactacccaaactgggtccaacaaaaaccaggtcaggcaccccgtggtctaataggtgggactaagttcctcgcccccggtactcctgccagattctcaggctccctgcttggaggcaaggctgccctcaccctctcaggggtacagccagaggatgaggcagaatattactgtgttctatggtacagcaaccgctgggtgttcggtggaggaaccaaactgactgtccta

SEQ ID NO: 1428 - protein, 119 aa, Artificial Sequence
  ME63F2-H
QVQLVQSGAEVKRPGASVKVSCKASGYTFTSYWLHWVRQTPGQRLEWIGMIDPSNSDTRFNPNFKDRVTMTVDTSANTAYMELSSLRSEDTAVYYCATYGSYVSPLDYWGQGTSVTVSS

SEQ ID NO: 1429 - protein, 5 aa, Artificial Sequence
  ME63F2-HCDR1
SYWLH

SEQ ID NO: 1430 - protein, 17 aa, Artificial Sequence
  ME63F2-HCDR2
MIDPSNSDTRFNPNFKD

SEQ ID NO: 1431 - protein, 10 aa, Artificial Sequence
  ME63F2-HCDR3
YGSYVSPLDY

SEQ ID NO: 1432 - DNA, 357 bp, Artificial Sequence
  ME63F2-H
caggtgcagctggtccagtctggggctgaagtgaagaggcctggggcttcagtgaaagtgtcctgcaaggcttcgggctataccttcaccagctactggttgcactgggttagacagacgcctggacaaaggcttgagtggataggcatgattgatccttccaatagtgacactaggtttaatccgaacttcaaggacagggtcacaatgactgtagacacatctgccaacacagcctacatggaactcagcagcctgagatctgaggacactgcagtctattactgtgccacatatggtagctacgtttcccctctggactactggggtcaaggaacctcggtcaccgtctcctca

SEQ ID NO: 1433 - protein, 113 aa, Artificial Sequence
  ME63F2-L
DIVMTQTPLSLPVTVGEQASISCKSSQSLLYTSSQKNYLAWYQQKPGQSPKLLIYWASTRESGVPDRFSGSGSGTDFTLKISRVEAEDLGVYYCQQYYAYPWTFGGGTKLEIK

SEQ ID NO: 1434 - protein, 17 aa, Artificial Sequence
  ME63F2-LCDR1
KSSQSLLYTSSQKNYLA

SEQ ID NO: 1435 - protein, 7 aa, Artificial Sequence
  ME63F2-LCDR2
WASTRES

SEQ ID NO: 1436 - protein, 9 aa, Artificial Sequence
  ME63F2-LCDR3
QQYYAYPWT

SEQ ID NO: 1437 - DNA, 339 bp, Artificial Sequence
  ME63F2-L
gacatcgtgatgacccagactccactctccctacctgtgacagttggagagcaggcttctatcagctgcaagtccagtcagtcccttttatatactagcagtcagaagaactacttggcctggtaccagcagaaaccaggtcagtctcctaaactgctgatttactgggcatccactagggaatctggggtccctgatcgcttctcaggcagtggatctgggacagatttcactctcaaaatctccagagtggaggctgaggacctgggagtttattactgtcagcaatattatgcctatccgtggacgttcggtggaggcacaaagttggagatcaaa

SEQ ID NO: 1438 - protein, 247 aa, Artificial Sequence
  ME63F2-HL
QVQLVQSGAEVKRPGASVKVSCKASGYTFTSYWLHWVRQTPGQRLEWIGMIDPSNSDTRFNPNFKDRVTMTVDTSANTAYMELSSLRSEDTAVYYCATYGSYVSPLDYWGQGTSVTVSSGGGGSGGGGSGGGGSDIVMTQTPLSLPVTVGEQASISCKSSQSLLYTSSQKNYLAWYQQKPGQSPKLLIYWASTRESGVPDRFSGSGSGTDFTLKISRVEAEDLGVYYCQQYYAYPWTFGGGTKLEIK

SEQ ID NO: 1439 - DNA, 741 bp, Artificial Sequence
  ME63F2-HL
caggtgcagctggtccagtctggggctgaagtgaagaggcctggggcttcagtgaaagtgtcctgcaaggcttcgggctataccttcaccagctactggttgcactgggttagacagacgcctggacaaaggcttgagtggataggcatgattgatccttccaatagtgacactaggtttaatccgaacttcaaggacagggtcacaatgactgtagacacatctgccaacacagcctacatggaactcagcagcctgagatctgaggacactgcagtctattactgtgccacatatggtagctacgtttcccctctggactactggggtcaaggaacctcggtcaccgtctcctcaggtggtggtggttctggcggcggcggctccggtggtggtggttctgacatcgtgatgacccagactccactctccctacctgtgacagttggagagcaggcttctatcagctgcaagtccagtcagtcccttttatatactagcagtcagaagaactacttggcctggtaccagcagaaaccaggtcagtctcctaaactgctgatttactgggcatccactagggaatctggggtccctgatcgcttctcaggcagtggatctgggacagatttcactctcaaaatctccagagtggaggctgaggacctgggagtttattactgtcagcaatattatgcctatccgtggacgttcggtggaggcacaaagttggagatcaaa

SEQ ID NO: 1440 - protein, 502 aa, Artificial Sequence
  ME63F2 HL x I2C HL
QVQLVQSGAEVKRPGASVKVSCKASGYTFTSYWLHWVRQTPGQRLEWIGMIDPSNSDTRFNPNFKDRVTMTVDTSANTAYMELSSLRSEDTAVYYCATYGSYVSPLDYWGQGTSVTVSSGGGGSGGGGSGGGGSDIVMTQTPLSLPVTVGEQASISCKSSQSLLYTSSQKNYLAWYQQKPGQSPKLLIYWASTRESGVPDRFSGSGSGTDFTLKISRVEAEDLGVYYCQQYYAYPWTFGGGTKLEIKSGGGGSEVQLVESGGGLVQPGGSLKLSCAASGFTFNKYAMNWVRQAPGKGLEWVARIRSKYNNYATYYADSVKDRFTISRDDSKNTAYLQMNNLKTEDTAVYYCVRHGNFGNSYISYWAYWGQGTLVTVSSGGGGSGGGGSGGGGSQTVVTQEPSLTVSPGGTVTLTCGSSTGAVTSGNYPNWVQQKPGQAPRGLIGGTKFLAPGTPARFSGSLLGGKAALTLSGVQPEDEAEYYCVLWYSNRWVFGGGTKLTVL

SEQ ID NO: 1441 - DNA, 1506 bp, Artificial Sequence
  ME63F2 HL x I2C HL
caggtgcagctggtccagtctggggctgaagtgaagaggcctggggcttcagtgaaagtgtcctgcaaggcttcgggctataccttcaccagctactggttgcactgggttagacagacgcctggacaaaggcttgagtggataggcatgattgatccttccaatagtgacactaggtttaatccgaacttcaaggacagggtcacaatgactgtagacacatctgccaacacagcctacatggaactcagcagcctgagatctgaggacactgcagtctattactgtgccacatatggtagctacgtttcccctctggactactggggtcaaggaacctcggtcaccgtctcctcaggtggtggtggttctggcggcggcggctccggtggtggtggttctgacatcgtgatgacccagactccactctccctacctgtgacagttggagagcaggcttctatcagctgcaagtccagtcagtcccttttatatactagcagtcagaagaactacttggcctggtaccagcagaaaccaggtcagtctcctaaactgctgatttactgggcatccactagggaatctggggtccctgatcgcttctcaggcagtggatctgggacagatttcactctcaaaatctccagagtggaggctgaggacctgggagtttattactgtcagcaatattatgcctatccgtggacgttcggtggaggcacaaagttggagatcaaatccggaggtggtggatccgaggtgcagctggtcgagtctggaggaggattggtgcagcctggagggtcattgaaactctcatgtgcagcctctggattcaccttcaataagtacgccatgaactgggtccgccaggctccaggaaagggtttggaatgggttgctcgcataagaagtaaatataataattatgcaacatattatgccgattcagtgaaagacaggttcaccatctccagagatgattcaaaaaacactgcctatctacaaatgaacaacttgaaaactgaggacactgccgtgtactactgtgtgagacatgggaacttcggtaatagctacatatcctactgggcttactggggccaagggactctggtcaccgtctcctcaggtggtggtggttctggcggcggcggctccggtggtggtggttctcagactgttgtgactcaggaaccttcactcaccgtatcacctggtggaacagtcacactcacttgtggctcctcgactggggctgttacatctggcaactacccaaactgggtccaacaaaaaccaggtcaggcaccccgtggtctaataggtgggactaagttcctcgcccccggtactcctgccagattctcaggctccctgcttggaggcaaggctgccctcaccctctcaggggtacagccagaggatgaggcagaatattactgtgttctatggtacagcaaccgctgggtgttcggtggaggaaccaaactgactgtccta

SEQ ID NO: 1442 - protein, 119 aa, Artificial Sequence
  ME62D11-H
QVQLVQSGPEVVKPGASVKVSCKASGYTFTSYWLHWVKQAPGQGLEWIGMIDPSNSDTRFNPNFKDRATLTVDTSASTAYMLLSSLRSEDTAVYYCATYGSYVSPLDYWGQGTSVTVSS

SEQ ID NO: 1443 - protein, 5 aa, Artificial Sequence
  ME62D11-HCDR1
SYWLH

SEQ ID NO: 1444 - protein, 17 aa, Artificial Sequence
  ME62D11-HCDR2
MIDPSNSDTRFNPNFKD

SEQ ID NO: 1445 - protein, 10 aa, Artificial Sequence
  ME62D11-HCDR3
YGSYVSPLDY

SEQ ID NO: 1446 - DNA, 357 bp, Artificial Sequence
  ME62D11-H
caggtgcagctggtccagtctgggcctgaagtggtgaagcctggggcttcagtgaaagtgtcctgcaaggcttcgggctataccttcaccagctactggttgcactgggttaaacaggcgcctggacaagggcttgagtggataggcatgattgatccttccaatagtgacactaggtttaatccgaacttcaaggacagggccacattgactgtagacacatctgccagcacagcctacatgctactcagcagcctgagatctgaggacactgcagtctattactgtgccacatatggtagctacgtttcccctctggactactggggtcaaggaacctcggtcaccgtctcctca

SEQ ID NO: 1447 - protein, 113 aa, Artificial Sequence
  ME62D11-L
DIVMTQTPSSLPVTLGETVSISCKSSQSLLYTSSQKNYLAWYLQKPGQSPQLLIYWASTRESGVPDRFSGSGSGTDFTLTISRVKAEDVAVYYCQQYYAYPWTFGGGTKLEIK

SEQ ID NO: 1448 - protein, 17 aa, Artificial Sequence
  ME62D11-LCDR1
KSSQSLLYTSSQKNYLA

SEQ ID NO: 1449 - protein, 7 aa, Artificial Sequence
  ME62D11-LCDR2
WASTRES

SEQ ID NO: 1450 - protein, 9 aa, Artificial Sequence
  ME62D11-LCDR3
QQYYAYPWT

SEQ ID NO: 1451 - DNA, 339 bp, Artificial Sequence
  ME62D11-L
gacatcgtgatgacccagactccatcctccctacctgtgacacttggagagacggtttctatcagctgcaagtccagtcagtcccttttatatactagcagtcagaagaactacttggcctggtacctgcagaaaccaggtcagtctcctcaactgctgatttactgggcatccactagggaatctggggtccctgatcgcttctcaggcagtggatctgggacagatttcactctcacaatctccagagtgaaggctgaggacgtggcagtttattactgtcagcaatattatgcctatccgtggacgttcggtggaggcacaaagttggagatcaaa

SEQ ID NO: 1452 - protein, 247 aa, Artificial Sequence
  ME62D11-HL
QVQLVQSGPEVVKPGASVKVSCKASGYTFTSYWLHWVKQAPGQGLEWIGMIDPSNSDTRFNPNFKDRATLTVDTSASTAYMLLSSLRSEDTAVYYCATYGSYVSPLDYWGQGTSVTVSSGGGGSGGGGSGGGGSDIVMTQTPSSLPVTLGETVSISCKSSQSLLYTSSQKNYLAWYLQKPGQSPQLLIYWASTRESGVPDRFSGSGSGTDFTLTISRVKAEDVAVYYCQQYYAYPWTFGGGTKLEIK

SEQ ID NO: 1453 - DNA, 741 bp, Artificial Sequence
  ME62D11-HL
caggtgcagctggtccagtctgggcctgaagtggtgaagcctggggcttcagtgaaagtgtcctgcaaggcttcgggctataccttcaccagctactggttgcactgggttaaacaggcgcctggacaagggcttgagtggataggcatgattgatccttccaatagtgacactaggtttaatccgaacttcaaggacagggccacattgactgtagacacatctgccagcacagcctacatgctactcagcagcctgagatctgaggacactgcagtctattactgtgccacatatggtagctacgtttcccctctggactactggggtcaaggaacctcggtcaccgtctcctcaggtggtggtggttctggcggcggcggctccggtggtggtggttctgacatcgtgatgacccagactccatcctccctacctgtgacacttggagagacggtttctatcagctgcaagtccagtcagtcccttttatatactagcagtcagaagaactacttggcctggtacctgcagaaaccaggtcagtctcctcaactgctgatttactgggcatccactagggaatctggggtccctgatcgcttctcaggcagtggatctgggacagatttcactctcacaatctccagagtgaaggctgaggacgtggcagtttattactgtcagcaatattatgcctatccgtggacgttcggtggaggcacaaagttggagatcaaa

SEQ ID NO: 1454 - protein, 502 aa, Artificial Sequence
  ME62D11 HL x I2C HL
QVQLVQSGPEVVKPGASVKVSCKASGYTFTSYWLHWVKQAPGQGLEWIGMIDPSNSDTRFNPNFKDRATLTVDTSASTAYMLLSSLRSEDTAVYYCATYGSYVSPLDYWGQGTSVTVSSGGGGSGGGGSGGGGSDIVMTQTPSSLPVTLGETVSISCKSSQSLLYTSSQKNYLAWYLQKPGQSPQLLIYWASTRESGVPDRFSGSGSGTDFTLTISRVKAEDVAVYYCQQYYAYPWTFGGGTKLEIKSGGGGSEVQLVESGGGLVQPGGSLKLSCAASGFTFNKYAMNWVRQAPGKGLEWVARIRSKYNNYATYYADSVKDRFTISRDDSKNTAYLQMNNLKTEDTAVYYCVRHGNFGNSYISYWAYWGQGTLVTVSSGGGGSGGGGSGGGGSQTVVTQEPSLTVSPGGTVTLTCGSSTGAVTSGNYPNWVQQKPGQAPRGLIGGTKFLAPGTPARFSGSLLGGKAALTLSGVQPEDEAEYYCVLWYSNRWVFGGGTKLTVL

SEQ ID NO: 1455 - DNA, 1506 bp, Artificial Sequence
  ME62D11 HL x I2C HL
caggtgcagctggtccagtctgggcctgaagtggtgaagcctggggcttcagtgaaagtgtcctgcaaggcttcgggctataccttcaccagctactggttgcactgggttaaacaggcgcctggacaagggcttgagtggataggcatgattgatccttccaatagtgacactaggtttaatccgaacttcaaggacagggccacattgactgtagacacatctgccagcacagcctacatgctactcagcagcctgagatctgaggacactgcagtctattactgtgccacatatggtagctacgtttcccctctggactactggggtcaaggaacctcggtcaccgtctcctcaggtggtggtggttctggcggcggcggctccggtggtggtggttctgacatcgtgatgacccagactccatcctccctacctgtgacacttggagagacggtttctatcagctgcaagtccagtcagtcccttttatatactagcagtcagaagaactacttggcctggtacctgcagaaaccaggtcagtctcctcaactgctgatttactgggcatccactagggaatctggggtccctgatcgcttctcaggcagtggatctgggacagatttcactctcacaatctccagagtgaaggctgaggacgtggcagtttattactgtcagcaatattatgcctatccgtggacgttcggtggaggcacaaagttggagatcaaatccggaggtggtggatccgaggtgcagctggtcgagtctggaggaggattggtgcagcctggagggtcattgaaactctcatgtgcagcctctggattcaccttcaataagtacgccatgaactgggtccgccaggctccaggaaagggtttggaatgggttgctcgcataagaagtaaatataataattatgcaacatattatgccgattcagtgaaagacaggttcaccatctccagagatgattcaaaaaacactgcctatctacaaatgaacaacttgaaaactgaggacactgccgtgtactactgtgtgagacatgggaacttcggtaatagctacatatcctactgggcttactggggccaagggactctggtcaccgtctcctcaggtggtggtggttctggcggcggcggctccggtggtggtggttctcagactgttgtgactcaggaaccttcactcaccgtatcacctggtggaacagtcacactcacttgtggctcctcgactggggctgttacatctggcaactacccaaactgggtccaacaaaaaccaggtcaggcaccccgtggtctaataggtgggactaagttcctcgcccccggtactcctgccagattctcaggctccctgcttggaggcaaggctgccctcaccctctcaggggtacagccagaggatgaggcagaatattactgtgttctatggtacagcaaccgctgggtgttcggtggaggaaccaaactgactgtccta

SEQ ID NO: 1456 - protein, 119 aa, Artificial Sequence
  ME62C10-H
QVQLVQSGAELKKPGASVKVSCKASGYTFTSYWLHWVKQAPGQRLEWIGMIDPSNSDTRFNPNFKDRVTITVDTSANTAYMELSSLRSEDTAVYYCATYGSYVSPLDYWGQGTSVTVSS

SEQ ID NO: 1457 - protein, 5 aa, Artificial Sequence
  ME62C10-HCDR1
SYWLH

SEQ ID NO: 1458 - protein, 17 aa, Artificial Sequence
  ME62C10-HCDR2
MIDPSNSDTRFNPNFKD

SEQ ID NO: 1459 - protein, 10 aa, Artificial Sequence
  ME62C10-HCDR3
YGSYVSPLDY

SEQ ID NO: 1460 - DNA, 357 bp, Artificial Sequence
  ME62C10-H
caggtgcagctggtccagtctggggctgaactgaagaagcctggggcttcagtgaaagtgtcctgcaaggcttcgggctataccttcaccagctactggttgcactgggttaaacaggcgcctggacaaaggcttgagtggataggcatgattgatccttccaatagtgacactaggtttaatccgaacttcaaggacagggtcacaatcactgtagacacatctgccaacacagcctacatggagctcagcagcctgagatctgaggacactgcagtctattactgtgccacatatggtagctacgtttcccctctggactactggggtcaaggaacctcggtcaccgtctcctca

SEQ ID NO: 1461 - protein, 113 aa, Artificial Sequence
  ME62C10-L
DIVMTQTPPSLTVTPGEQVSISCKSSQSLLYTSSQKNYLAWYLQKPGQSPKLLIYWASTRESGVPDRFSGSGSGTDFTLKISSVEADDVGVYYCQQYYAYPWTFGGGTKLEIK

SEQ ID NO: 1462 - protein, 17 aa, Artificial Sequence
  ME62C10-LCDR1
KSSQSLLYTSSQKNYLA

SEQ ID NO: 1463 - protein, 7 aa, Artificial Sequence
  ME62C10-LCDR2
WASTRES

SEQ ID NO: 1464 - protein, 9 aa, Artificial Sequence
  ME62C10-LCDR3
QQYYAYPWT

SEQ ID NO: 1465 - DNA, 339 bp, Artificial Sequence
  ME62C10-L
gacatcgtgatgacccagactccaccctccctaactgtgacacctggagagcaggtttctatcagctgcaagtccagtcagtcccttttatatactagcagtcagaagaactacttggcctggtacctgcagaaaccaggtcagtctcctaaactgctgatttactgggcatccactagggaatctggggtccctgatcgcttctcaggcagtggatctgggacagatttcactctcaaaatctccagtgtggaggctgacgacgtgggagtttattactgtcagcaatattatgcctatccgtggacgttcggtggaggcacaaagttggagatcaaa

SEQ ID NO: 1466 - protein, 247 aa, Artificial Sequence
  ME62C10-HL
QVQLVQSGAELKKPGASVKVSCKASGYTFTSYWLHWVKQAPGQRLEWIGMIDPSNSDTRFNPNFKDRVTITVDTSANTAYMELSSLRSEDTAVYYCATYGSYVSPLDYWGQGTSVTVSSGGGGSGGGGSGGGGSDIVMTQTPPSLTVTPGEQVSISCKSSQSLLYTSSQKNYLAWYLQKPGQSPKLLIYWASTRESGVPDRFSGSGSGTDFTLKISSVEADDVGVYYCQQYYAYPWTFGGGTKLEIK

SEQ ID NO: 1467 - DNA, 741 bp, Artificial Sequence
  ME62C10-HL
caggtgcagctggtccagtctggggctgaactgaagaagcctggggcttcagtgaaagtgtcctgcaaggcttcgggctataccttcaccagctactggttgcactgggttaaacaggcgcctggacaaaggcttgagtggataggcatgattgatccttccaatagtgacactaggtttaatccgaacttcaaggacagggtcacaatcactgtagacacatctgccaacacagcctacatggagctcagcagcctgagatctgaggacactgcagtctattactgtgccacatatggtagctacgtttcccctctggactactggggtcaaggaacctcggtcaccgtctcctcaggtggtggtggttctggcggcggcggctccggtggtggtggttctgacatcgtgatgacccagactccaccctccctaactgtgacacctggagagcaggtttctatcagctgcaagtccagtcagtcccttttatatactagcagtcagaagaactacttggcctggtacctgcagaaaccaggtcagtctcctaaactgctgatttactgggcatccactagggaatctggggtccctgatcgcttctcaggcagtggatctgggacagatttcactctcaaaatctccagtgtggaggctgacgacgtgggagtttattactgtcagcaatattatgcctatccgtggacgttcggtggaggcacaaagttggagatcaaa

SEQ ID NO: 1468 - protein, 502 aa, Artificial Sequence
  ME62C10 HL x I2C HL
QVQLVQSGAELKKPGASVKVSCKASGYTFTSYWLHWVKQAPGQRLEWIGMIDPSNSDTRFNPNFKDRVTITVDTSANTAYMELSSLRSEDTAVYYCATYGSYVSPLDYWGQGTSVTVSSGGGGSGGGGSGGGGSDIVMTQTPPSLTVTPGEQVSISCKSSQSLLYTSSQKNYLAWYLQKPGQSPKLLIYWASTRESGVPDRFSGSGSGTDFTLKISSVEADDVGVYYCQQYYAYPWTFGGGTKLEIKSGGGGSEVQLVESGGGLVQPGGSLKLSCAASGFTFNKYAMNWVRQAPGKGLEWVARIRSKYNNYATYYADSVKDRFTISRDDSKNTAYLQMNNLKTEDTAVYYCVRHGNFGNSYISYWAYWGQGTLVTVSSGGGGSGGGGSGGGGSQTVVTQEPSLTVSPGGTVTLTCGSSTGAVTSGNYPNWVQQKPGQAPRGLIGGTKFLAPGTPARFSGSLLGGKAALTLSGVQPEDEAEYYCVLWYSNRWVFGGGTKLTVL

SEQ ID NO: 1469 - DNA, 1506 bp, Artificial Sequence
  ME62C10 HL x I2C HL
caggtgcagctggtccagtctggggctgaactgaagaagcctggggcttcagtgaaagtgtcctgcaaggcttcgggctataccttcaccagctactggttgcactgggttaaacaggcgcctggacaaaggcttgagtggataggcatgattgatccttccaatagtgacactaggtttaatccgaacttcaaggacagggtcacaatcactgtagacacatctgccaacacagcctacatggagctcagcagcctgagatctgaggacactgcagtctattactgtgccacatatggtagctacgtttcccctctggactactggggtcaaggaacctcggtcaccgtctcctcaggtggtggtggttctggcggcggcggctccggtggtggtggttctgacatcgtgatgacccagactccaccctccctaactgtgacacctggagagcaggtttctatcagctgcaagtccagtcagtcccttttatatactagcagtcagaagaactacttggcctggtacctgcagaaaccaggtcagtctcctaaactgctgatttactgggcatccactagggaatctggggtccctgatcgcttctcaggcagtggatctgggacagatttcactctcaaaatctccagtgtggaggctgacgacgtgggagtttattactgtcagcaatattatgcctatccgtggacgttcggtggaggcacaaagttggagatcaaatccggaggtggtggatccgaggtgcagctggtcgagtctggaggaggattggtgcagcctggagggtcattgaaactctcatgtgcagcctctggattcaccttcaataagtacgccatgaactgggtccgccaggctccaggaaagggtttggaatgggttgctcgcataagaagtaaatataataattatgcaacatattatgccgattcagtgaaagacaggttcaccatctccagagatgattcaaaaaacactgcctatctacaaatgaacaacttgaaaactgaggacactgccgtgtactactgtgtgagacatgggaacttcggtaatagctacatatcctactgggcttactggggccaagggactctggtcaccgtctcctcaggtggtggtggttctggcggcggcggctccggtggtggtggttctcagactgttgtgactcaggaaccttcactcaccgtatcacctggtggaacagtcacactcacttgtggctcctcgactggggctgttacatctggcaactacccaaactgggtccaacaaaaaccaggtcaggcaccccgtggtctaataggtgggactaagttcctcgcccccggtactcctgccagattctcaggctccctgcttggaggcaaggctgccctcaccctctcaggggtacagccagaggatgaggcagaatattactgtgttctatggtacagcaaccgctgggtgttcggtggaggaaccaaactgactgtccta

SEQ ID NO: 1470 - protein, 119 aa, Artificial Sequence
  ME62A4-H
QVQLVQSGAEVMKPGASVKVSCRASGYTFTSYWLHWVRQAPGQGLEWIGMIDPSNSDTRFNPNFKDRVTMTVDTSSSTAYMELSSLRSEDTAVYYCATYGSYVSPLDYWGQGTSVTVSS

SEQ ID NO: 1471 - protein, 5 aa, Artificial Sequence
  ME62A4-HCDR1
SYWLH

SEQ ID NO: 1472 - protein, 17 aa, Artificial Sequence
  ME62A4-HCDR2
MIDPSNSDTRFNPNFKD

SEQ ID NO: 1473 - protein, 10 aa, Artificial Sequence
  ME62A4-HCDR3
YGSYVSPLDY

SEQ ID NO: 1474 - DNA, 357 bp, Artificial Sequence
  ME62A4-H
caggtgcagctggtccagtctggggctgaagtgatgaagcctggggcttcagtgaaagtgtcctgcagggcttcgggctataccttcaccagctactggttgcactgggttagacaggcgcctggacaagggcttgagtggataggcatgattgatccttccaatagtgacactaggtttaatccgaacttcaaggacagggtcacaatgactgtagacacatcttccagcacagcctacatggagctcagcagcctgagatctgaggacactgcagtctattactgtgccacatatggtagctacgtttcccctctggactactggggtcaaggaacctcggtcaccgtctcctca

SEQ ID NO: 1475 - protein, 113 aa, Artificial Sequence
  ME62A4-L
DIVMTQTPFSLPVTAGETVSISCKSSQSLLYTSSQKNYLAWYLQKPGQSPQLLIYWASTRESGVPDRFSGSGSGTDFTLKISRVEAEDVGVYYCQQYYAYPWTFGGGTKLEIK

SEQ ID NO: 1476 - protein, 17 aa, Artificial Sequence
  ME62A4-LCDR1
KSSQSLLYTSSQKNYLA

SEQ ID NO: 1477 - protein, 7 aa, Artificial Sequence
  ME62A4-LCDR2
WASTRES

SEQ ID NO: 1478 - protein, 9 aa, Artificial Sequence
  ME62A4-LCDR3
QQYYAYPWT

SEQ ID NO: 1479 - DNA, 339 bp, Artificial Sequence
  ME62A4-L
gacatcgtgatgacccagactccattctccctacctgtgacagctggagagacggtttctatcagctgcaagtccagtcagtcccttttatatactagcagtcagaagaactacttggcctggtacctgcagaaaccaggtcagtctcctcaactgctgatttactgggcatccactagggaatctggggtccctgatcgcttctcaggcagtggatctgggacagatttcactctcaaaatctccagagtggaggctgaggacgtgggagtttattactgtcagcaatattatgcctatccgtggacgttcggtggaggcacaaagttggagatcaaa

SEQ ID NO: 1480 - protein, 247 aa, Artificial Sequence
  ME62A4-HL
QVQLVQSGAEVMKPGASVKVSCRASGYTFTSYWLHWVRQAPGQGLEWIGMIDPSNSDTRFNPNFKDRVTMTVDTSSSTAYMELSSLRSEDTAVYYCATYGSYVSPLDYWGQGTSVTVSSGGGGSGGGGSGGGGSDIVMTQTPFSLPVTAGETVSISCKSSQSLLYTSSQKNYLAWYLQKPGQSPQLLIYWASTRESGVPDRFSGSGSGTDFTLKISRVEAEDVGVYYCQQYYAYPWTFGGGTKLEIK

SEQ ID NO: 1481 - DNA, 741 bp, Artificial Sequence
  ME62A4-HL
caggtgcagctggtccagtctggggctgaagtgatgaagcctggggcttcagtgaaagtgtcctgcagggcttcgggctataccttcaccagctactggttgcactgggttagacaggcgcctggacaagggcttgagtggataggcatgattgatccttccaatagtgacactaggtttaatccgaacttcaaggacagggtcacaatgactgtagacacatcttccagcacagcctacatggagctcagcagcctgagatctgaggacactgcagtctattactgtgccacatatggtagctacgtttcccctctggactactggggtcaaggaacctcggtcaccgtctcctcaggtggtggtggttctggcggcggcggctccggtggtggtggttctgacatcgtgatgacccagactccattctccctacctgtgacagctggagagacggtttctatcagctgcaagtccagtcagtcccttttatatactagcagtcagaagaactacttggcctggtacctgcagaaaccaggtcagtctcctcaactgctgatttactgggcatccactagggaatctggggtccctgatcgcttctcaggcagtggatctgggacagatttcactctcaaaatctccagagtggaggctgaggacgtgggagtttattactgtcagcaatattatgcctatccgtggacgttcggtggaggcacaaagttggagatcaaa

SEQ ID NO: 1482 - protein, 502 aa, Artificial Sequence
  ME62A4 HL x I2C HL
QVQLVQSGAEVMKPGASVKVSCRASGYTFTSYWLHWVRQAPGQGLEWIGMIDPSNSDTRFNPNFKDRVTMTVDTSSSTAYMELSSLRSEDTAVYYCATYGSYVSPLDYWGQGTSVTVSSGGGGSGGGGSGGGGSDIVMTQTPFSLPVTAGETVSISCKSSQSLLYTSSQKNYLAWYLQKPGQSPQLLIYWASTRESGVPDRFSGSGSGTDFTLKISRVEAEDVGVYYCQQYYAYPWTFGGGTKLEIKSGGGGSEVQLVESGGGLVQPGGSLKLSCAASGFTFNKYAMNWVRQAPGKGLEWVARIRSKYNNYATYYADSVKDRFTISRDDSKNTAYLQMNNLKTEDTAVYYCVRHGNFGNSYISYWAYWGQGTLVTVSSGGGGSGGGGSGGGGSQTVVTQEPSLTVSPGGTVTLTCGSSTGAVTSGNYPNWVQQKPGQAPRGLIGGTKFLAPGTPARFSGSLLGGKAALTLSGVQPEDEAEYYCVLWYSNRWVFGGGTKLTVL

SEQ ID NO: 1483 - DNA, 1506 bp, Artificial Sequence
  ME62A4 HL x I2C HL
caggtgcagctggtccagtctggggctgaagtgatgaagcctggggcttcagtgaaagtgtcctgcagggcttcgggctataccttcaccagctactggttgcactgggttagacaggcgcctggacaagggcttgagtggataggcatgattgatccttccaatagtgacactaggtttaatccgaacttcaaggacagggtcacaatgactgtagacacatcttccagcacagcctacatggagctcagcagcctgagatctgaggacactgcagtctattactgtgccacatatggtagctacgtttcccctctggactactggggtcaaggaacctcggtcaccgtctcctcaggtggtggtggttctggcggcggcggctccggtggtggtggttctgacatcgtgatgacccagactccattctccctacctgtgacagctggagagacggtttctatcagctgcaagtccagtcagtcccttttatatactagcagtcagaagaactacttggcctggtacctgcagaaaccaggtcagtctcctcaactgctgatttactgggcatccactagggaatctggggtccctgatcgcttctcaggcagtggatctgggacagatttcactctcaaaatctccagagtggaggctgaggacgtgggagtttattactgtcagcaatattatgcctatccgtggacgttcggtggaggcacaaagttggagatcaaatccggaggtggtggatccgaggtgcagctggtcgagtctggaggaggattggtgcagcctggagggtcattgaaactctcatgtgcagcctctggattcaccttcaataagtacgccatgaactgggtccgccaggctccaggaaagggtttggaatgggttgctcgcataagaagtaaatataataattatgcaacatattatgccgattcagtgaaagacaggttcaccatctccagagatgattcaaaaaacactgcctatctacaaatgaacaacttgaaaactgaggacactgccgtgtactactgtgtgagacatgggaacttcggtaatagctacatatcctactgggcttactggggccaagggactctggtcaccgtctcctcaggtggtggtggttctggcggcggcggctccggtggtggtggttctcagactgttgtgactcaggaaccttcactcaccgtatcacctggtggaacagtcacactcacttgtggctcctcgactggggctgttacatctggcaactacccaaactgggtccaacaaaaaccaggtcaggcaccccgtggtctaataggtgggactaagttcctcgcccccggtactcctgccagattctcaggctccctgcttggaggcaaggctgccctcaccctctcaggggtacagccagaggatgaggcagaatattactgtgttctatggtacagcaaccgctgggtgttcggtggaggaaccaaactgactgtccta

SEQ ID NO: 1484 - protein, 126 aa, Mus sp.
EVQLLEQSGAELVRPGTSVKMSCKAAGYTFTKYWIGWVKQRPGHGLEWIGDIHPGGGYANYNEKFKGKATLTADTSSSTAYMQLSRLTSDDSAIYYCARSGYDYGSSYDYHGMDFWGQGTTVTVSS

SEQ ID NO: 1485 - protein, 5 aa, Mus sp.
KYWIG

SEQ ID NO: 1486 - protein, 17 aa, Mus sp.
DIHPGGGYANYNEKFKG

SEQ ID NO: 1487 - protein, 16 aa, Mus sp.
SGYDYGSSYDYHGMDF

SEQ ID NO: 1488 - DNA, 378 bp, Mus sp.
gaggtgcagctgctcgagcagtctggagctgagctggttaggcctgggacttcagtgaagatgtcctgcaaggctgctggatacaccttcactaagtactggataggttgggtaaagcagaggcctggacatggccttgagtggattggagatattcaccctggaggtggttatgctaactacaatgagaagttcaagggcaaggccacactgactgcagacacatcctccagcacagcctacatgcagctcagcagactgacatctgatgactccgccatctattactgtgcaagatcggggtatgactacggtagtagttacgattaccatggtatggacttctggggccaagggaccacggtcaccgtctcctca

SEQ ID NO: 1489 - protein, 107 aa, Mus sp.
ELQMTQSPASLSASVGEPVTFTCRASENIYSYLAWYQQKQGKSPQLLIYGATNLADGMSSRFSGSGSGRQYSLKISSLHPDDVATYYCQNVLSTPYTFGGGTKLEIK

SEQ ID NO: 1490 - protein, 11 aa, Mus sp.
RASENIYSYLA

SEQ ID NO: 1491 - protein, 7 aa, Mus sp.
GATNLAD

SEQ ID NO: 1492 - protein, 9 aa, Mus sp.
QNVLSTPYT

SEQ ID NO: 1493 - DNA, 321 bp, Mus sp.
gagctccagatgacccagtctccagcctccctatctgcatctgtgggagaacctgtcaccttcacatgtcgagcaagtgagaatatttacagttatttagcatggtatcagcagaaacagggaaaatctcctcagctcctgatctatggtgcaaccaacttggcagatggcatgtcatcgaggttcagtggcagtggatctggtagacagtattctctcaagatcagtagcctgcatcctgacgatgttgcaacgtattactgtcaaaatgtgttaagtactccgtacacgttcggaggggggaccaagcttgagatcaaa

SEQ ID NO: 1494 - protein, 248 aa, Mus sp.
EVQLLEQSGAELVRPGTSVKMSCKAAGYTFTKYWIGWVKQRPGHGLEWIGDIHPGGGYANYNEKFKGKATLTADTSSSTAYMQLSRLTSDDSAIYYCARSGYDYGSSYDYHGMDFWGQGTTVTVSSGGGGSGGGGSGGGGSELQMTQSPASLSASVGEPVTFTCRASENIYSYLAWYQQKQGKSPQLLIYGATNLADGMSSRFSGSGSGRQYSLKISSLHPDDVATYYCQNVLSTPYTFGGGTKLEIK

SEQ ID NO: 1495 - DNA, 744 bp, Mus sp.
gaggtgcagctgctcgagcagtctggagctgagctggttaggcctgggacttcagtgaagatgtcctgcaaggctgctggatacaccttcactaagtactggataggttgggtaaagcagaggcctggacatggccttgagtggattggagatattcaccctggaggtggttatgctaactacaatgagaagttcaagggcaaggccacactgactgcagacacatcctccagcacagcctacatgcagctcagcagactgacatctgatgactccgccatctattactgtgcaagatcggggtatgactacggtagtagttacgattaccatggtatggacttctggggccaagggaccacggtcaccgtctcctcaggtggtggtggttctggcggcggcggctccggtggtggtggttctgagctccagatgacccagtctccagcctccctatctgcatctgtgggagaacctgtcaccttcacatgtcgagcaagtgagaatatttacagttatttagcatggtatcagcagaaacagggaaaatctcctcagctcctgatctatggtgcaaccaacttggcagatggcatgtcatcgaggttcagtggcagtggatctggtagacagtattctctcaagatcagtagcctgcatcctgacgatgttgcaacgtattactgtcaaaatgtgttaagtactccgtacacgttcggaggggggaccaagcttgagatcaaa

SEQ ID NO: 1496 - protein, 503 aa, Mus sp.
EVQLLEQSGAELVRPGTSVKMSCKAAGYTFTKYWIGWVKQRPGHGLEWIGDIHPGGGYANYNEKFKGKATLTADTSSSTAYMQLSRLTSDDSAIYYCARSGYDYGSSYDYHGMDFWGQGTTVTVSSGGGGSGGGGSGGGGSELQMTQSPASLSASVGEPVTFTCRASENIYSYLAWYQQKQGKSPQLLIYGATNLADGMSSRFSGSGSGRQYSLKISSLHPDDVATYYCQNVLSTPYTFGGGTKLEIKSGGGGSEVQLVESGGGLVQPGGSLKLSCAASGFTFNKYAMNWVRQAPGKGLEWVARIRSKYNNYATYYADSVKDRFTISRDDSKNTAYLQMNNLKTEDTAVYYCVRHGNFGNSYISYWAYWGQGTLVTVSSGGGGSGGGGSGGGGSQTVVTQEPSLTVSPGGTVTLTCGSSTGAVTSGNYPNWVQQKPGQAPRGLIGGTKFLAPGTPARFSGSLLGGKAALTLSGVQPEDEAEYYCVLWYSNRWVFGGGTKLTVL

SEQ ID NO: 1497 - DNA, 1509 bp, Mus sp.
gaggtgcagctgctcgagcagtctggagctgagctggttaggcctgggacttcagtgaagatgtcctgcaaggctgctggatacaccttcactaagtactggataggttgggtaaagcagaggcctggacatggccttgagtggattggagatattcaccctggaggtggttatgctaactacaatgagaagttcaagggcaaggccacactgactgcagacacatcctccagcacagcctacatgcagctcagcagactgacatctgatgactccgccatctattactgtgcaagatcggggtatgactacggtagtagttacgattaccatggtatggacttctggggccaagggaccacggtcaccgtctcctcaggtggtggtggttctggcggcggcggctccggtggtggtggttctgagctccagatgacccagtctccagcctccctatctgcatctgtgggagaacctgtcaccttcacatgtcgagcaagtgagaatatttacagttatttagcatggtatcagcagaaacagggaaaatctcctcagctcctgatctatggtgcaaccaacttggcagatggcatgtcatcgaggttcagtggcagtggatctggtagacagtattctctcaagatcagtagcctgcatcctgacgatgttgcaacgtattactgtcaaaatgtgttaagtactccgtacacgttcggaggggggaccaagcttgagatcaaatccggaggtggtggatccgaggtgcagctggtcgagtctggaggaggattggtgcagcctggagggtcattgaaactctcatgtgcagcctctggattcaccttcaataagtacgccatgaactgggtccgccaggctccaggaaagggtttggaatgggttgctcgcataagaagtaaatataataattatgcaacatattatgccgattcagtgaaagacaggttcaccatctccagagatgattcaaaaaacactgcctatctacaaatgaacaacttgaaaactgaggacactgccgtgtactactgtgtgagacatgggaacttcggtaatagctacatatcctactgggcttactggggccaagggactctggtcaccgtctcctcaggtggtggtggttctggcggcggcggctccggtggtggtggttctcagactgttgtgactcaggaaccttcactcaccgtatcacctggtggaacagtcacactcacttgtggctcctcgactggggctgttacatctggcaactacccaaactgggtccaacaaaaaccaggtcaggcaccccgtggtctaataggtgggactaagttcctcgcccccggtactcctgccagattctcaggctccctgcttggaggcaaggctgccctcaccctctcaggggtacagccagaggatgaggcagaatattactgtgttctatggtacagcaaccgctgggtgttcggtggaggaaccaaactgactgtccta

SEQ ID NO: 1498 - protein, 127 aa, Mus sp.
EVQLLEQSGAELVRPGTSVKISCKATGYTFSNYWISWVKYRPGHGLEWIGDIYPGGSYTNYNEKFKGKVTLTADTSSRTAYMQLSGLTFEDSAIYYCARSGYDYGSDYDYHGMDYWGQGTTVTVSSG

SEQ ID NO: 1499 - protein, 5 aa, Mus sp.
NYWIS

SEQ ID NO: 1500 - protein, 17 aa, Mus sp.
DIYPGGSYTNYNEKFKG

SEQ ID NO: 1501 - protein, 16 aa, Mus sp.
SGYDYGSDYDYHGMDY

SEQ ID NO: 1502 - DNA, 378 bp, Mus sp.
gaggtgcagctgctcgagcagtctggagctgagctggtaaggcctgggacttcagtgaagatttcctgcaaggctactgggtacaccttcagtaattactggataagttgggtaaagtataggcctggacatggtcttgagtggattggagatatttaccctggaggcagttatactaattacaatgagaaattcaagggcaaggtcacactgactgcagacacatcctccaggacagcctacatgcagctcagcggcctgacatttgaggactctgccatctactactgtgcaagatcggggtatgactacggtagtgactacgattaccatggtatggactactggggccaagggaccacggtcaccgtctcctca

SEQ ID NO: 1503 - protein, 107 aa, Mus sp.
ELQMTQSPASLSASVGETVTITCRASENIYSNLAWYQQKQGKSPQLLVYAATNLADGVPSRFSGSRSGSDYSLTISSLESEDFVDYYCLQYASYPYTFGGGTKLEIK

SEQ ID NO: 1504 - protein, 11 aa, Mus sp.
RASENIYSNLA

SEQ ID NO: 1505 - protein, 7 aa, Mus sp.
AATNLAD

SEQ ID NO: 1506 - protein, 9 aa, Mus sp.
LQYASYPYT

SEQ ID NO: 1507 - DNA, 321 bp, Mus sp.
gagctccagatgacccagtctccagcctccctatctgcatctgtgggagaaactgtcaccatcacatgtcgagcaagtgagaatatttacagtaatttagcatggtatcagcagaaacagggaaaatctcctcagctcctggtctatgctgcaacaaacttagcagatggtgtgccatcaaggttcagtggcagtaggtctgggtcagattattctctcaccatcagcagccttgagtctgaagattttgtagactattactgtctacaatatgctagttatccgtacacgttcggaggggggaccaagcttgagatcaaa

SEQ ID NO: 1508 - protein, 248 aa, Mus sp.
EVQLLEQSGAELVRPGTSVKISCKATGYTFSNYWISWVKYRPGHGLEWIGDIYPGGSYTNYNEKFKGKVTLTADTSSRTAYMQLSGLTFEDSAIYYCARSGYDYGSDYDYHGMDYWGQGTTVTVSSGGGGSGGGGSGGGGSELQMTQSPASLSASVGETVTITCRASENIYSNLAWYQQKQGKSPQLLVYAATNLADGVPSRFSGSRSGSDYSLTISSLESEDFVDYYCLQYASYPYTFGGGTKLEIK

SEQ ID NO: 1509 - DNA, 744 bp, Mus sp.
gaggtgcagctgctcgagcagtctggagctgagctggtaaggcctgggacttcagtgaagatttcctgcaaggctactgggtacaccttcagtaattactggataagttgggtaaagtataggcctggacatggtcttgagtggattggagatatttaccctggaggcagttatactaattacaatgagaaattcaagggcaaggtcacactgactgcagacacatcctccaggacagcctacatgcagctcagcggcctgacatttgaggactctgccatctactactgtgcaagatcggggtatgactacggtagtgactacgattaccatggtatggactactggggccaagggaccacggtcaccgtctcctcaggtggtggtggttctggcggcggcggctccggtggtggtggttctgagctccagatgacccagtctccagcctccctatctgcatctgtgggagaaactgtcaccatcacatgtcgagcaagtgagaatatttacagtaatttagcatggtatcagcagaaacagggaaaatctcctcagctcctggtctatgctgcaacaaacttagcagatggtgtgccatcaaggttcagtggcagtaggtctgggtcagattattctctcaccatcagcagccttgagtctgaagattttgtagactattactgtctacaatatgctagttatccgtacacgttcggaggggggaccaagcttgagatcaaa

SEQ ID NO: 1510 - protein, 503 aa, Mus sp.
EVQLLEQSGAELVRPGTSVKISCKATGYTFSNYWISWVKYRPGHGLEWIGDIYPGGSYTNYNEKFKGKVTLTADTSSRTAYMQLSGLTFEDSAIYYCARSGYDYGSDYDYHGMDYWGQGTTVTVSSGGGGSGGGGSGGGGSELQMTQSPASLSASVGETVTITCRASENIYSNLAWYQQKQGKSPQLLVYAATNLADGVPSRFSGSRSGSDYSLTISSLESEDFVDYYCLQYASYPYTFGGGTKLEIKSGGGGSEVQLVESGGGLVQPGGSLKLSCAASGFTFNKYAMNWVRQAPGKGLEWVARIRSKYNNYATYYADSVKDRFTISRDDSKNTAYLQMNNLKTEDTAVYYCVRHGNFGNSYISYWAYWGQGTLVTVSSGGGGSGGGGSGGGGSQTVVTQEPSLTVSPGGTVTLTCGSSTGAVTSGNYPNWVQQKPGQAPRGLIGGTKFLAPGTPARFSGSLLGGKAALTLSGVQPEDEAEYYCVLWYSNRWVFGGGTKLTVL

SEQ ID NO: 1511 - DNA, 1509 bp, Mus sp.
gaggtgcagctgctcgagcagtctggagctgagctggtaaggcctgggacttcagtgaagatttcctgcaaggctactgggtacaccttcagtaattactggataagttgggtaaagtataggcctggacatggtcttgagtggattggagatatttaccctggaggcagttatactaattacaatgagaaattcaagggcaaggtcacactgactgcagacacatcctccaggacagcctacatgcagctcagcggcctgacatttgaggactctgccatctactactgtgcaagatcggggtatgactacggtagtgactacgattaccatggtatggactactggggccaagggaccacggtcaccgtctcctcaggtggtggtggttctggcggcggcggctccggtggtggtggttctgagctccagatgacccagtctccagcctccctatctgcatctgtgggagaaactgtcaccatcacatgtcgagcaagtgagaatatttacagtaatttagcatggtatcagcagaaacagggaaaatctcctcagctcctggtctatgctgcaacaaacttagcagatggtgtgccatcaaggttcagtggcagtaggtctgggtcagattattctctcaccatcagcagccttgagtctgaagattttgtagactattactgtctacaatatgctagttatccgtacacgttcggaggggggaccaagcttgagatcaaatccggaggtggtggatccgaggtgcagctggtcgagtctggaggaggattggtgcagcctggagggtcattgaaactctcatgtgcagcctctggattcaccttcaataagtacgccatgaactgggtccgccaggctccaggaaagggtttggaatgggttgctcgcataagaagtaaatataataattatgcaacatattatgccgattcagtgaaagacaggttcaccatctccagagatgattcaaaaaacactgcctatctacaaatgaacaacttgaaaactgaggacactgccgtgtactactgtgtgagacatgggaacttcggtaatagctacatatcctactgggcttactggggccaagggactctggtcaccgtctcctcaggtggtggtggttctggcggcggcggctccggtggtggtggttctcagactgttgtgactcaggaaccttcactcaccgtatcacctggtggaacagtcacactcacttgtggctcctcgactggggctgttacatctggcaactacccaaactgggtccaacaaaaaccaggtcaggcaccccgtggtctaataggtgggactaagttcctcgcccccggtactcctgccagattctcaggctccctgcttggaggcaaggctgccctcaccctctcaggggtacagccagaggatgaggcagaatattactgtgttctatggtacagcaaccgctgggtgttcggtggaggaaccaaactgactgtccta

SEQ ID NO: 1512 - protein, 119 aa, Mus sp.
EVQLLEQSGAELVRPGTSVKVSCKASGYAFTHYLIEWVKQRPGQGLEWIGMINPENTDTTYNEKFRDKAILTVDKSSNTAYMQLSSLTSDDSAVYFCARQEITSDFDFWGQGTTVTVSS

SEQ ID NO: 1513 - protein, 5 aa, Mus sp.
HYLIE

SEQ ID NO: 1514 - protein, 17 aa, Mus sp.
MINPENTDTTYNEKFRD

SEQ ID NO: 1515 - protein, 9 aa, Mus sp.
QEITSDFDF

SEQ ID NO: 1516 - DNA, 357 bp, Mus sp.
gaggtgcagctgctcgagcagtctggagctgagctggtaaggcctgggacttcagtgaaggtgtcctgcaaggcttctggatacgccttcactcattacttaatagagtgggtgaagcagaggcctggacagggccttgagtggattggaatgattaatcctgaaaatactgatactacctacaatgagaagttcagggacaaggcaatactgactgtagacaaatcctccaacactgcctacatgcagctcagcagcctgacttctgatgactctgcggtctatttctgtgcaagacaggagattacgtcggactttgacttctggggccaagggaccacggtcaccgtctcctca

SEQ ID NO: 1517 - protein, 108 aa, Mus sp.
ELVLTQSPTTMAASPGEKITITCSASSSISSNYLHWYQQKPGFSPKLLIYRTSNLASGVPARFSGSGSGTSYSLTIGTMEAEDVATYYCQQGSSIPYTFGGGTKLEIK

SEQ ID NO: 1518 - protein, 12 aa, Mus sp.
SASSSISSNYLH

SEQ ID NO: 1519 - protein, 7 aa, Mus sp.
RTSNLAS

SEQ ID NO: 1520 - protein, 9 aa, Mus sp.
QQGSSIPYT

SEQ ID NO: 1521 - DNA, 324 bp, Mus sp.
gagctcgtgctcacccagtctccaaccaccatggctgcatctcccggggagaagatcactatcacctgcagtgccagctcaagtataagttccaattacttgcattggtatcagcagaagccaggattctcccctaaactcttgatttataggacatccaatctggcttctggagtcccagctcgcttcagtggcagtgggtctgggacctcttactctctcacaattggcaccatggaggctgaagatgttgccacttactactgccagcagggtagtagtataccgtacacgttcggaggggggaccaagcttgagatcaaa

SEQ ID NO: 1522 - protein, 242 aa, Mus sp.
EVQLLEQSGAELVRPGTSVKVSCKASGYAFTHYLIEWVKQRPGQGLEWIGMINPENTDTTYNEKFRDKAILTVDKSSNTAYMQLSSLTSDDSAVYFCARQEITSDFDFWGQGTTVTVSSGGGGSGGGGSGGGGSELVLTQSPTTMAASPGEKITITCSASSSISSNYLHWYQQKPGFSPKLLIYRTSNLASGVPARFSGSGSGTSYSLTIGTMEAEDVATYYCQQGSSIPYTFGGGTKLEIK

SEQ ID NO: 1523 - DNA, 726 bp, Mus sp.
gaggtgcagctgctcgagcagtctggagctgagctggtaaggcctgggacttcagtgaaggtgtcctgcaaggcttctggatacgccttcactcattacttaatagagtgggtgaagcagaggcctggacagggccttgagtggattggaatgattaatcctgaaaatactgatactacctacaatgagaagttcagggacaaggcaatactgactgtagacaaatcctccaacactgcctacatgcagctcagcagcctgacttctgatgactctgcggtctatttctgtgcaagacaggagattacgtcggactttgacttctggggccaagggaccacggtcaccgtctcctcaggtggtggtggttctggcggcggcggctccggtggtggtggttctgagctcgtgctcacccagtctccaaccaccatggctgcatctcccggggagaagatcactatcacctgcagtgccagctcaagtataagttccaattacttgcattggtatcagcagaagccaggattctcccctaaactcttgatttataggacatccaatctggcttctggagtcccagctcgcttcagtggcagtgggtctgggacctcttactctctcacaattggcaccatggaggctgaagatgttgccacttactactgccagcagggtagtagtataccgtacacgttcggaggggggaccaagcttgagatcaaa

SEQ ID NO: 1524 - protein, 497 aa, Mus sp.
EVQLLEQSGAELVRPGTSVKVSCKASGYAFTHYLIEWVKQRPGQGLEWIGMINPENTDTTYNEKFRDKAILTVDKSSNTAYMQLSSLTSDDSAVYFCARQEITSDFDFWGQGTTVTVSSGGGGSGGGGSGGGGSELVLTQSPTTMAASPGEKITITCSASSSISSNYLHWYQQKPGFSPKLLIYRTSNLASGVPARFSGSGSGTSYSLTIGTMEAEDVATYYCQQGSSIPYTFGGGTKLEIKSGGGGSEVQLVESGGGLVQPGGSLKLSCAASGFTFNKYAMNWVRQAPGKGLEWVARIRSKYNNYATYYADSVKDRFTISRDDSKNTAYLQMNNLKTEDTAVYYCVRHGNFGNSYISYWAYWGQGTLVTVSSGGGGSGGGGSGGGGSQTVVTQEPSLTVSPGGTVTLTCGSSTGAVTSGNYPNWVQQKPGQAPRGLIGGTKFLAPGTPARFSGSLLGGKAALTLSGVQPEDEAEYYCVLWYSNRWVFGGGTKLTVL

SEQ ID NO: 1525 - DNA, 1491 bp, Mus sp.
gaggtgcagctgctcgagcagtctggagctgagctggtaaggcctgggacttcagtgaaggtgtcctgcaaggcttctggatacgccttcactcattacttaatagagtgggtgaagcagaggcctggacagggccttgagtggattggaatgattaatcctgaaaatactgatactacctacaatgagaagttcagggacaaggcaatactgactgtagacaaatcctccaacactgcctacatgcagctcagcagcctgacttctgatgactctgcggtctatttctgtgcaagacaggagattacgtcggactttgacttctggggccaagggaccacggtcaccgtctcctcaggtggtggtggttctggcggcggcggctccggtggtggtggttctgagctcgtgctcacccagtctccaaccaccatggctgcatctcccggggagaagatcactatcacctgcagtgccagctcaagtataagttccaattacttgcattggtatcagcagaagccaggattctcccctaaactcttgatttataggacatccaatctggcttctggagtcccagctcgcttcagtggcagtgggtctgggacctcttactctctcacaattggcaccatggaggctgaagatgttgccacttactactgccagcagggtagtagtataccgtacacgttcggaggggggaccaagcttgagatcaaatccggaggtggtggatccgaggtgcagctggtcgagtctggaggaggattggtgcagcctggagggtcattgaaactctcatgtgcagcctctggattcaccttcaataagtacgccatgaactgggtccgccaggctccaggaaagggtttggaatgggttgctcgcataagaagtaaatataataattatgcaacatattatgccgattcagtgaaagacaggttcaccatctccagagatgattcaaaaaacactgcctatctacaaatgaacaacttgaaaactgaggacactgccgtgtactactgtgtgagacatgggaacttcggtaatagctacatatcctactgggcttactggggccaagggactctggtcaccgtctcctcaggtggtggtggttctggcggcggcggctccggtggtggtggttctcagactgttgtgactcaggaaccttcactcaccgtatcacctggtggaacagtcacactcacttgtggctcctcgactggggctgttacatctggcaactacccaaactgggtccaacaaaaaccaggtcaggcaccccgtggtctaataggtgggactaagttcctcgcccccggtactcctgccagattctcaggctccctgcttggaggcaaggctgccctcaccctctcaggggtacagccagaggatgaggcagaatattactgtgttctatggtacagcaaccgctgggtgttcggtggaggaaccaaactgactgtccta

SEQ ID NO: 1526 - protein, 126 aa, Mus sp.
EVQLLEQSGAELVRPGTSVKISCKTTGYTFGYYWISWLKQRPGHGLEWIGDIYPGGGYTNYHEKFKGKVTLTADTSSRTAYMQLSSLTFEDSAIYYCARSGYDYGSDYDYHGMDYWGQGTTVTVSS

SEQ ID NO: 1527 - protein, 5 aa, Mus sp.
YYWIS

SEQ ID NO: 1528 - protein, 17 aa, Mus sp.
DIYPGGGYTNYHEKFKG

SEQ ID NO: 1529 - protein, 16 aa, Mus sp.
SGYDYGSDYDYHGMDY

SEQ ID NO: 1530 - DNA, 378 bp, Mus sp.
gaggtgcagctgctcgagcagtctggagctgagctggttaggcctgggacttcagtgaagatttcctgcaagactactgggtacaccttcggttattactggataagttggttaaagcagaggcctggacatggccttgagtggattggagatatttaccctggaggtggttacactaactaccatgagaaattcaagggcaaggtcacactgactgcagacacatcctccaggacagcctacatgcagctcagcagcctgacatttgaggactctgccatctattactgtgcaagatcgggatatgactacggtagtgactacgattatcatggtatggattactggggccaagggaccacggtcaccgtctcctca

SEQ ID NO: 1531 - protein, 107 aa, Mus sp.
ELVMTQTPSSLSASLGDRVTISCRASQGISNYLNWYQQKPDGSVKLLIYYTSRLHSGVPSRFSGSGSGTDYSLTISNLDQEDIATYFCQQGNTLPWTFGGGTKLEIK

SEQ ID NO: 1532 - protein, 11 aa, Mus sp.
RASQGISNYLN

SEQ ID NO: 1533 - protein, 7 aa, Mus sp.
YTSRLHS

SEQ ID NO: 1534 - protein, 7 aa, Mus sp.
QQGNTLP

SEQ ID NO: 1535 - DNA, 321 bp, Mus sp.
gagctcgtgatgacccagactccatcctccctgtctgcctctctgggagacagagtcaccatcagttgcagggcaagtcagggcattagcaattatttaaactggtatcagcagaaaccagatggatctgttaaactcctgatctactacacatcaagattacactcaggagtcccatcaaggttcagtggcagtgggtctggaacagattattctctcaccattagcaacctggatcaagaagatattgccacttacttttgccaacagggtaatacgcttccgtggacgttcggaggggggaccaagcttgagatcaaa

SEQ ID NO: 1536 - protein, 248 aa, Mus sp.
EVQLLEQSGAELVRPGTSVKISCKTTGYTFGYYWISWLKQRPGHGLEWIGDIYPGGGYTNYHEKFKGKVTLTADTSSRTAYMQLSSLTFEDSAIYYCARSGYDYGSDYDYHGMDYWGQGTTVTVSSGGGGSGGGGSGGGGSELVMTQTPSSLSASLGDRVTISCRASQGISNYLNWYQQKPDGSVKLLIYYTSRLHSGVPSRFSGSGSGTDYSLTISNLDQEDIATYFCQQGNTLPWTFGGGTKLEIK

SEQ ID NO: 1537 - DNA, 744 bp, Mus sp.
gaggtgcagctgctcgagcagtctggagctgagctggttaggcctgggacttcagtgaagatttcctgcaagactactgggtacaccttcggttattactggataagttggttaaagcagaggcctggacatggccttgagtggattggagatatttaccctggaggtggttacactaactaccatgagaaattcaagggcaaggtcacactgactgcagacacatcctccaggacagcctacatgcagctcagcagcctgacatttgaggactctgccatctattactgtgcaagatcgggatatgactacggtagtgactacgattatcatggtatggattactggggccaagggaccacggtcaccgtctcctcaggtggtggtggttctggcggcggcggctccggtggtggtggttctgagctcgtgatgacccagactccatcctccctgtctgcctctctgggagacagagtcaccatcagttgcagggcaagtcagggcattagcaattatttaaactggtatcagcagaaaccagatggatctgttaaactcctgatctactacacatcaagattacactcaggagtcccatcaaggttcagtggcagtgggtctggaacagattattctctcaccattagcaacctggatcaagaagatattgccacttacttttgccaacagggtaatacgcttccgtggacgttcggaggggggaccaagcttgagatcaaa

SEQ ID NO: 1538 - protein, 503 aa, Mus sp.
EVQLLEQSGAELVRPGTSVKISCKTTGYTFGYYWISWLKQRPGHGLEWIGDIYPGGGYTNYHEKFKGKVTLTADTSSRTAYMQLSSLTFEDSAIYYCARSGYDYGSDYDYHGMDYWGQGTTVTVSSGGGGSGGGGSGGGGSELVMTQTPSSLSASLGDRVTISCRASQGISNYLNWYQQKPDGSVKLLIYYTSRLHSGVPSRFSGSGSGTDYSLTISNLDQEDIATYFCQQGNTLPWTFGGGTKLEIKSGGGGSEVQLVESGGGLVQPGGSLKLSCAASGFTFNKYAMNWVRQAPGKGLEWVARIRSKYNNYATYYADSVKDRFTISRDDSKNTAYLQMNNLKTEDTAVYYCVRHGNFGNSYISYWAYWGQGTLVTVSSGGGGSGGGGSGGGGSQTVVTQEPSLTVSPGGTVTLTCGSSTGAVTSGNYPNWVQQKPGQAPRGLIGGTKFLAPGTPARFSGSLLGGKAALTLSGVQPEDEAEYYCVLWYSNRWVFGGGTKLTVL

SEQ ID NO: 1539 - DNA, 1509 bp, Mus sp.
gaggtgcagctgctcgagcagtctggagctgagctggttaggcctgggacttcagtgaagatttcctgcaagactactgggtacaccttcggttattactggataagttggttaaagcagaggcctggacatggccttgagtggattggagatatttaccctggaggtggttacactaactaccatgagaaattcaagggcaaggtcacactgactgcagacacatcctccaggacagcctacatgcagctcagcagcctgacatttgaggactctgccatctattactgtgcaagatcgggatatgactacggtagtgactacgattatcatggtatggattactggggccaagggaccacggtcaccgtctcctcaggtggtggtggttctggcggcggcggctccggtggtggtggttctgagctcgtgatgacccagactccatcctccctgtctgcctctctgggagacagagtcaccatcagttgcagggcaagtcagggcattagcaattatttaaactggtatcagcagaaaccagatggatctgttaaactcctgatctactacacatcaagattacactcaggagtcccatcaaggttcagtggcagtgggtctggaacagattattctctcaccattagcaacctggatcaagaagatattgccacttacttttgccaacagggtaatacgcttccgtggacgttcggaggggggaccaagcttgagatcaaatccggaggtggtggatccgaggtgcagctggtcgagtctggaggaggattggtgcagcctggagggtcattgaaactctcatgtgcagcctctggattcaccttcaataagtacgccatgaactgggtccgccaggctccaggaaagggtttggaatgggttgctcgcataagaagtaaatataataattatgcaacatattatgccgattcagtgaaagacaggttcaccatctccagagatgattcaaaaaacactgcctatctacaaatgaacaacttgaaaactgaggacactgccgtgtactactgtgtgagacatgggaacttcggtaatagctacatatcctactgggcttactggggccaagggactctggtcaccgtctcctcaggtggtggtggttctggcggcggcggctccggtggtggtggttctcagactgttgtgactcaggaaccttcactcaccgtatcacctggtggaacagtcacactcacttgtggctcctcgactggggctgttacatctggcaactacccaaactgggtccaacaaaaaccaggtcaggcaccccgtggtctaataggtgggactaagttcctcgcccccggtactcctgccagattctcaggctccctgcttggaggcaaggctgccctcaccctctcaggggtacagccagaggatgaggcagaatattactgtgttctatggtacagcaaccgctgggtgttcggtggaggaaccaaactgactgtccta

SEQ ID NO: 1540 - protein, 126 aa, Mus sp.
EVQLLEQSGAEVVRPGTSVKMSCKAAGYTFTKYWIGWVKQRPGHGLEWIGDIHPGGGFANYNEKFKGKATLTADTSSSTAYMQLSRLTSDDSAIYYCARSGYDYGSSYDYHGMDYWGQGTTVTVSS

SEQ ID NO: 1541 - protein, 5 aa, Mus sp.
KYWIG

SEQ ID NO: 1542 - protein, 17 aa, Mus sp.
DIHPGGGFANYNEKFKG

SEQ ID NO: 1543 - protein, 16 aa, Mus sp.
SGYDYGSSYDYHGMDY

SEQ ID NO: 1544 - DNA, 378 bp, Mus sp.
gaggtgcagctgctcgagcagtctggagctgaggtggttaggcctgggacttcagtgaagatgtcctgcaaggctgctggatacaccttcactaagtactggataggttgggtaaagcagaggcctggacatggccttgagtggattggagatattcaccctggaggtggttttgctaactacaatgagaagttcaagggcaaggccacactgactgcagacacatcctccagcacagcctacatgcagctcagcagactgacatctgatgactctgccatctattactgtgcaagatcgggttatgactacggtagtagttacgattaccatggtatggactactggggccaagggaccacggtcaccgtctcctca

SEQ ID NO: 1545 - protein, 107 aa, Mus sp.
ELVMTQSPSSLSASLGERVSLTCRASQEISGYLSWLQQKPDGTIKRLIYAASTLDSGVPKRFSGSRSGSDYSLTISSLESEDFADYYCLQYASYPPTFGGGTKLEIK

SEQ ID NO: 1546 - protein, 11 aa, Mus sp.
RASQEISGYLS

SEQ ID NO: 1547 - protein, 7 aa, Mus sp.
AASTLDS

SEQ ID NO: 1548 - protein, 9 aa, Mus sp.
LQYASYPPT

SEQ ID NO: 1549 - DNA, 321 bp, Mus sp.
gagctcgtgatgacacagtctccatcctccttatctgcctctctgggagaaagagtcagtctcacttgtcgggcaagtcaggaaattagtggttacttaagctggcttcagcagaaaccagatggaactattaaacgcctgatctacgccgcatccactttagattctggtgtcccaaaaaggttcagtggcagtaggtctgggtcagattattctctcaccatcagcagccttgagtctgaagattttgcagactattactgtctacaatatgctagttatcctcccacgttcggaggggggaccaagcttgagatcaaa

SEQ ID NO: 1550 - protein, 248 aa, Mus sp.
EVQLLEQSGAEVVRPGTSVKMSCKAAGYTFTKYWIGWVKQRPGHGLEWIGDIHPGGGFANYNEKFKGKATLTADTSSSTAYMQLSRLTSDDSAIYYCARSGYDYGSSYDYHGMDYWGQGTTVTVSSGGGGSGGGGSGGGGSELVMTQSPSSLSASLGERVSLTCRASQEISGYLSWLQQKPDGTIKRLIYAASTLDSGVPKRFSGSRSGSDYSLTISSLESEDFADYYCLQYASYPPTFGGGTKLEIK

SEQ ID NO: 1551 - DNA, 744 bp, Mus sp.
gaggtgcagctgctcgagcagtctggagctgaggtggttaggcctgggacttcagtgaagatgtcctgcaaggctgctggatacaccttcactaagtactggataggttgggtaaagcagaggcctggacatggccttgagtggattggagatattcaccctggaggtggttttgctaactacaatgagaagttcaagggcaaggccacactgactgcagacacatcctccagcacagcctacatgcagctcagcagactgacatctgatgactctgccatctattactgtgcaagatcgggttatgactacggtagtagttacgattaccatggtatggactactggggccaagggaccacggtcaccgtctcctcaggtggtggtggttctggcggcggcggctccggtggtggtggttctgagctcgtgatgacacagtctccatcctccttatctgcctctctgggagaaagagtcagtctcacttgtcgggcaagtcaggaaattagtggttacttaagctggcttcagcagaaaccagatggaactattaaacgcctgatctacgccgcatccactttagattctggtgtcccaaaaaggttcagtggcagtaggtctgggtcagattattctctcaccatcagcagccttgagtctgaagattttgcagactattactgtctacaatatgctagttatcctcccacgttcggaggggggaccaagcttgagatcaaa

SEQ ID NO: 1552 - protein, 503 aa, Mus sp.
EVQLLEQSGAEVVRPGTSVKMSCKAAGYTFTKYWIGWVKQRPGHGLEWIGDIHPGGGFANYNEKFKGKATLTADTSSSTAYMQLSRLTSDDSAIYYCARSGYDYGSSYDYHGMDYWGQGTTVTVSSGGGGSGGGGSGGGGSELVMTQSPSSLSASLGERVSLTCRASQEISGYLSWLQQKPDGTIKRLIYAASTLDSGVPKRFSGSRSGSDYSLTISSLESEDFADYYCLQYASYPPTFGGGTKLEIKSGGGGSEVQLVESGGGLVQPGGSLKLSCAASGFTFNKYAMNWVRQAPGKGLEWVARIRSKYNNYATYYADSVKDRFTISRDDSKNTAYLQMNNLKTEDTAVYYCVRHGNFGNSYISYWAYWGQGTLVTVSSGGGGSGGGGSGGGGSQTVVTQEPSLTVSPGGTVTLTCGSSTGAVTSGNYPNWVQQKPGQAPRGLIGGTKFLAPGTPARFSGSLLGGKAALTLSGVQPEDEAEYYCVLWYSNRWVFGGGTKLTVL

SEQ ID NO: 1553 - DNA, 1509 bp, Mus sp.
gaggtgcagctgctcgagcagtctggagctgaggtggttaggcctgggacttcagtgaagatgtcctgcaaggctgctggatacaccttcactaagtactggataggttgggtaaagcagaggcctggacatggccttgagtggattggagatattcaccctggaggtggttttgctaactacaatgagaagttcaagggcaaggccacactgactgcagacacatcctccagcacagcctacatgcagctcagcagactgacatctgatgactctgccatctattactgtgcaagatcgggttatgactacggtagtagttacgattaccatggtatggactactggggccaagggaccacggtcaccgtctcctcaggtggtggtggttctggcggcggcggctccggtggtggtggttctgagctcgtgatgacacagtctccatcctccttatctgcctctctgggagaaagagtcagtctcacttgtcgggcaagtcaggaaattagtggttacttaagctggcttcagcagaaaccagatggaactattaaacgcctgatctacgccgcatccactttagattctggtgtcccaaaaaggttcagtggcagtaggtctgggtcagattattctctcaccatcagcagccttgagtctgaagattttgcagactattactgtctacaatatgctagttatcctcccacgttcggaggggggaccaagcttgagatcaaatccggaggtggtggatccgaggtgcagctggtcgagtctggaggaggattggtgcagcctggagggtcattgaaactctcatgtgcagcctctggattcaccttcaataagtacgccatgaactgggtccgccaggctccaggaaagggtttggaatgggttgctcgcataagaagtaaatataataattatgcaacatattatgccgattcagtgaaagacaggttcaccatctccagagatgattcaaaaaacactgcctatctacaaatgaacaacttgaaaactgaggacactgccgtgtactactgtgtgagacatgggaacttcggtaatagctacatatcctactgggcttactggggccaagggactctggtcaccgtctcctcaggtggtggtggttctggcggcggcggctccggtggtggtggttctcagactgttgtgactcaggaaccttcactcaccgtatcacctggtggaacagtcacactcacttgtggctcctcgactggggctgttacatctggcaactacccaaactgggtccaacaaaaaccaggtcaggcaccccgtggtctaataggtgggactaagttcctcgcccccggtactcctgccagattctcaggctccctgcttggaggcaaggctgccctcaccctctcaggggtacagccagaggatgaggcagaatattactgtgttctatggtacagcaaccgctgggtgttcggtggaggaaccaaactgactgtccta

SEQ ID NO: 1554 - protein, 126 aa, Mus sp.
EVQLLEQSGAELVRPGTSVKIPCKATGYTFSYYWIGWVKQRPGHGLEWIGDIYPGGGYSNYNEKFKGKATLTADTSSSTAYMQLSGLTSEDSAIYYCARSGYDYGSDYDYHGLDYWGQGTTVTVSS

SEQ ID NO: 1555 - protein, 5 aa, Mus sp.
YYWIG

SEQ ID NO: 1556 - protein, 17 aa, Mus sp.
DIYPGGGYSNYNEKFKG

SEQ ID NO: 1557 - protein, 16 aa, Mus sp.
SGYDYGSDYDYHGLDY

SEQ ID NO: 1558 - DNA, 378 bp, Mus sp.
gaggtgcagctgctcgagcagtctggagctgaactggtaaggcctgggacttcagtgaagattccctgcaaggctactggatacaccttcagttattactggataggttgggtaaagcagaggcctggacatggccttgagtggattggagatatttaccctggaggtggttatagtaactacaatgagaaattcaagggaaaggccacactgactgcagacacatcctccagcacagcctacatgcagctcagcggcctgacatctgaggactctgccatctattactgtgcaagatcgggatatgactacggtagtgactacgattaccatggtctggactactggggccaagggaccacggtcaccgtctcctca

SEQ ID NO: 1559 - protein, 111 aa, Mus sp.
ELVLTQSPASLAVSLGQRATISCRASESVEYYGTSLMQWYQQKPGQPPKLLIYAASNVESGVPARFSGSGSGTDFSLNIHPVEEDDIAMYFCQQSRKVPYTFGGGTKLEIK

SEQ ID NO: 1560 - protein, 15 aa, Mus sp.
RASESVEYYGTSLMQ

SEQ ID NO: 1561 - protein, 7 aa, Mus sp.
AASNVES

SEQ ID NO: 1562 - protein, 9 aa, Mus sp.
QQSRKVPYT

SEQ ID NO: 1563 - DNA, 333 bp, Mus sp.
gagctcgtgctcacccagtctccagcttctttggctgtgtctctagggcagagagccaccatctcctgcagagccagtgaaagtgttgaatattatggcacaagtttaatgcagtggtaccaacagaaaccaggacagccacccaaactcctcatctatgctgcatccaacgtagaatctggggtccctgccaggtttagtggcagtgggtctgggacagacttcagcctcaacatccatcctgtggaggaggatgatattgcaatgtatttctgtcagcaaagtaggaaggttccgtacacgttcggaggggggaccaagcttgagatcaaa

SEQ ID NO: 1564 - protein, 252 aa, Mus sp.
EVQLLEQSGAELVRPGTSVKIPCKATGYTFSYYWIGWVKQRPGHGLEWIGDIYPGGGYSNYNEKFKGKATLTADTSSSTAYMQLSGLTSEDSAIYYCARSGYDYGSDYDYHGLDYWGQGTTVTVSSGGGGSGGGGSGGGGSELVLTQSPASLAVSLGQRATISCRASESVEYYGTSLMQWYQQKPGQPPKLLIYAASNVESGVPARFSGSGSGTDFSLNIHPVEEDDIAMYFCQQSRKVPYTFGGGTKLEIK

SEQ ID NO: 1565 - DNA, 756 bp, Mus sp.
gaggtgcagctgctcgagcagtctggagctgaactggtaaggcctgggacttcagtgaagattccctgcaaggctactggatacaccttcagttattactggataggttgggtaaagcagaggcctggacatggccttgagtggattggagatatttaccctggaggtggttatagtaactacaatgagaaattcaagggaaaggccacactgactgcagacacatcctccagcacagcctacatgcagctcagcggcctgacatctgaggactctgccatctattactgtgcaagatcgggatatgactacggtagtgactacgattaccatggtctggactactggggccaagggaccacggtcaccgtctcctcaggtggtggtggttctggcggcggcggctccggtggtggtggttctgagctcgtgctcacccagtctccagcttctttggctgtgtctctagggcagagagccaccatctcctgcagagccagtgaaagtgttgaatattatggcacaagtttaatgcagtggtaccaacagaaaccaggacagccacccaaactcctcatctatgctgcatccaacgtagaatctggggtccctgccaggtttagtggcagtgggtctgggacagacttcagcctcaacatccatcctgtggaggaggatgatattgcaatgtatttctgtcagcaaagtaggaaggttccgtacacgttcggaggggggaccaagcttgagatcaaa

SEQ ID NO: 1566 - protein, 507 aa, Mus sp.
EVQLLEQSGAELVRPGTSVKIPCKATGYTFSYYWIGWVKQRPGHGLEWIGDIYPGGGYSNYNEKFKGKATLTADTSSSTAYMQLSGLTSEDSAIYYCARSGYDYGSDYDYHGLDYWGQGTTVTVSSGGGGSGGGGSGGGGSELVLTQSPASLAVSLGQRATISCRASESVEYYGTSLMQWYQQKPGQPPKLLIYAASNVESGVPARFSGSGSGTDFSLNIHPVEEDDIAMYFCQQSRKVPYTFGGGTKLEIKSGGGGSEVQLVESGGGLVQPGGSLKLSCAASGFTFNKYAMNWVRQAPGKGLEWVARIRSKYNNYATYYADSVKDRFTISRDDSKNTAYLQMNNLKTEDTAVYYCVRHGNFGNSYISYWAYWGQGTLVTVSSGGGGSGGGGSGGGGSQTVVTQEPSLTVSPGGTVTLTCGSSTGAVTSGNYPNWVQQKPGQAPRGLIGGTKFLAPGTPARFSGSLLGGKAALTLSGVQPEDEAEYYCVLWYSNRWVFGGGTKLTVL

SEQ ID NO: 1567 - DNA, 1521 bp, Mus sp.
gaggtgcagctgctcgagcagtctggagctgaactggtaaggcctgggacttcagtgaagattccctgcaaggctactggatacaccttcagttattactggataggttgggtaaagcagaggcctggacatggccttgagtggattggagatatttaccctggaggtggttatagtaactacaatgagaaattcaagggaaaggccacactgactgcagacacatcctccagcacagcctacatgcagctcagcggcctgacatctgaggactctgccatctattactgtgcaagatcgggatatgactacggtagtgactacgattaccatggtctggactactggggccaagggaccacggtcaccgtctcctcaggtggtggtggttctggcggcggcggctccggtggtggtggttctgagctcgtgctcacccagtctccagcttctttggctgtgtctctagggcagagagccaccatctcctgcagagccagtgaaagtgttgaatattatggcacaagtttaatgcagtggtaccaacagaaaccaggacagccacccaaactcctcatctatgctgcatccaacgtagaatctggggtccctgccaggtttagtggcagtgggtctgggacagacttcagcctcaacatccatcctgtggaggaggatgatattgcaatgtatttctgtcagcaaagtaggaaggttccgtacacgttcggaggggggaccaagcttgagatcaaatccggaggtggtggatccgaggtgcagctggtcgagtctggaggaggattggtgcagcctggagggtcattgaaactctcatgtgcagcctctggattcaccttcaataagtacgccatgaactgggtccgccaggctccaggaaagggtttggaatgggttgctcgcataagaagtaaatataataattatgcaacatattatgccgattcagtgaaagacaggttcaccatctccagagatgattcaaaaaacactgcctatctacaaatgaacaacttgaaaactgaggacactgccgtgtactactgtgtgagacatgggaacttcggtaatagctacatatcctactgggcttactggggccaagggactctggtcaccgtctcctcaggtggtggtggttctggcggcggcggctccggtggtggtggttctcagactgttgtgactcaggaaccttcactcaccgtatcacctggtggaacagtcacactcacttgtggctcctcgactggggctgttacatctggcaactacccaaactgggtccaacaaaaaccaggtcaggcaccccgtggtctaataggtgggactaagttcctcgcccccggtactcctgccagattctcaggctccctgcttggaggcaaggctgccctcaccctctcaggggtacagccagaggatgaggcagaatattactgtgttctatggtacagcaaccgctgggtgttcggtggaggaaccaaactgactgtccta

SEQ ID NO: 1568 - protein, 126 aa, Mus sp.; identical to SEQ ID NO: 1540

SEQ ID NO: 1569 - protein, 5 aa, Mus sp.
KYWIG

SEQ ID NO: 1570 - protein, 17 aa, Mus sp.
DIHPGGGFANYNEKFKG

SEQ ID NO: 1571 - protein, 16 aa, Mus sp.
SGYDYGSSYDYHGMDY

SEQ ID NO: 1572 - DNA, 378 bp, Mus sp.; identical to SEQ ID NO: 1544

SEQ ID NO: 1573 - protein, 111 aa, Mus sp.
ELQMTQSPTSLAVSLGQRATISCRASQTVYYDGNNYMNWYQHKPGQPPKLLIYATSNLESGIPARFSGSGSGTDFTLNIHPVEAEDAATYYCQQSYEDPYTFGGGTKLEIK

SEQ ID NO: 1574 - protein, 15 aa, Mus sp.
RASQTVYYDGNNYMN

SEQ ID NO: 1575 - protein, 7 aa, Mus sp.
ATSNLES

SEQ ID NO: 1576 - protein, 9 aa, Mus sp.
QQSYEDPYT

SEQ ID NO: 1577 - DNA, 333 bp, Mus sp.
gagctccagatgacccagtctccaacttctttggctgtgtctctcgggcagagggccaccatctcctgcagggccagccaaactgtttactatgatggtaataattatatgaactggtatcaacacaaaccaggacagccacccaaactcctcatctatgctacatccaatctagaatctgggatcccagccaggtttagtggcagtgggtctgggacagacttcaccctcaacatccatcctgtggaggcggaggatgctgcaacctattactgtcagcaaagttatgaggatccgtacacgttcggaggggggaccaagcttgagatcaaa

SEQ ID NO: 1578 - protein, 252 aa, Mus sp.
EVQLLEQSGAEVVRPGTSVKMSCKAAGYTFTKYWIGWVKQRPGHGLEWIGDIHPGGGFANYNEKFKGKATLTADTSSSTAYMQLSRLTSDDSAIYYCARSGYDYGSSYDYHGMDYWGQGTTVTVSSGGGGSGGGGSGGGGSELQMTQSPTSLAVSLGQRATISCRASQTVYYDGNNYMNWYQHKPGQPPKLLIYATSNLESGIPARFSGSGSGTDFTLNIHPVEAEDAATYYCQQSYEDPYTFGGGTKLEIK

SEQ ID NO: 1579 - DNA, 756 bp, Mus sp.
gaggtgcagctgctcgagcagtctggagctgaggtggttaggcctgggacttcagtgaagatgtcctgcaaggctgctggatacaccttcactaagtactggataggttgggtaaagcagaggcctggacatggccttgagtggattggagatattcaccctggaggtggttttgctaactacaatgagaagttcaagggcaaggccacactgactgcagacacatcctccagcacagcctacatgcagctcagcagactgacatctgatgactctgccatctattactgtgcaagatcgggttatgactacggtagtagttacgattaccatggtatggactactggggccaagggaccacggtcaccgtctcctcaggtggtggtggttctggcggcggcggctccggtggtggtggttctgagctccagatgacccagtctccaacttctttggctgtgtctctcgggcagagggccaccatctcctgcagggccagccaaactgtttactatgatggtaataattatatgaactggtatcaacacaaaccaggacagccacccaaactcctcatctatgctacatccaatctagaatctgggatcccagccaggtttagtggcagtgggtctgggacagacttcaccctcaacatccatcctgtggaggcggaggatgctgcaacctattactgtcagcaaagttatgaggatccgtacacgttcggaggggggaccaagcttgagatcaaa

SEQ ID NO: 1580 - protein, 507 aa, Mus sp.
EVQLLEQSGAEVVRPGTSVKMSCKAAGYTFTKYWIGWVKQRPGHGLEWIGDIHPGGGFANYNEKFKGKATLTADTSSSTAYMQLSRLTSDDSAIYYCARSGYDYGSSYDYHGMDYWGQGTTVTVSSGGGGSGGGGSGGGGSELQMTQSPTSLAVSLGQRATISCRASQTVYYDGNNYMNWYQHKPGQPPKLLIYATSNLESGIPARFSGSGSGTDFTLNIHPVEAEDAATYYCQQSYEDPYTFGGGTKLEIKSGGGGSEVQLVESGGGLVQPGGSLKLSCAASGFTFNKYAMNWVRQAPGKGLEWVARIRSKYNNYATYYADSVKDRFTISRDDSKNTAYLQMNNLKTEDTAVYYCVRHGNFGNSYISYWAYWGQGTLVTVSSGGGGSGGGGSGGGGSQTVVTQEPSLTVSPGGTVTLTCGSSTGAVTSGNYPNWVQQKPGQAPRGLIGGTKFLAPGTPARFSGSLLGGKAALTLSGVQPEDEAEYYCVLWYSNRWVFGGGTKLTVL

SEQ ID NO: 1581 - DNA, 1521 bp, Mus sp.
gaggtgcagctgctcgagcagtctggagctgaggtggttaggcctgggacttcagtgaagatgtcctgcaaggctgctggatacaccttcactaagtactggataggttgggtaaagcagaggcctggacatggccttgagtggattggagatattcaccctggaggtggttttgctaactacaatgagaagttcaagggcaaggccacactgactgcagacacatcctccagcacagcctacatgcagctcagcagactgacatctgatgactctgccatctattactgtgcaagatcgggttatgactacggtagtagttacgattaccatggtatggactactggggccaagggaccacggtcaccgtctcctcaggtggtggtggttctggcggcggcggctccggtggtggtggttctgagctccagatgacccagtctccaacttctttggctgtgtctctcgggcagagggccaccatctcctgcagggccagccaaactgtttactatgatggtaataattatatgaactggtatcaacacaaaccaggacagccacccaaactcctcatctatgctacatccaatctagaatctgggatcccagccaggtttagtggcagtgggtctgggacagacttcaccctcaacatccatcctgtggaggcggaggatgctgcaacctattactgtcagcaaagttatgaggatccgtacacgttcggaggggggaccaagcttgagatcaaatccggaggtggtggatccgaggtgcagctggtcgagtctggaggaggattggtgcagcctggagggtcattgaaactctcatgtgcagcctctggattcaccttcaataagtacgccatgaactgggtccgccaggctccaggaaagggtttggaatgggttgctcgcataagaagtaaatataataattatgcaacatattatgccgattcagtgaaagacaggttcaccatctccagagatgattcaaaaaacactgcctatctacaaatgaacaacttgaaaactgaggacactgccgtgtactactgtgtgagacatgggaacttcggtaatagctacatatcctactgggcttactggggccaagggactctggtcaccgtctcctcaggtggtggtggttctggcggcggcggctccggtggtggtggttctcagactgttgtgactcaggaaccttcactcaccgtatcacctggtggaacagtcacactcacttgtggctcctcgactggggctgttacatctggcaactacccaaactgggtccaacaaaaaccaggtcaggcaccccgtggtctaataggtgggactaagttcctcgcccccggtactcctgccagattctcaggctccctgcttggaggcaaggctgccctcaccctctcaggggtacagccagaggatgaggcagaatattactgtgttctatggtacagcaaccgctgggtgttcggtggaggaaccaaactgactgtccta

SEQ ID NO: 1582 - protein, 126 aa, Mus sp.
EVQLLEQSGAELVRPGTSVKISCKATGYTFTTYWLGWVKQRPGHGLEWIGEIHPGGGYTNYNEKFKGKATLTADTSSSTAYMQLSRLTSDDSAIYYCARSGYDYGSSYDYYGMDYWGQGTTVTVSS

SEQ ID NO: 1583 - protein, 5 aa, Mus sp.
TYWLG

SEQ ID NO: 1584 - protein, 17 aa, Mus sp.
EIHPGGGYTNYNEKFKG

SEQ ID NO: 1585 - protein, 16 aa, Mus sp.
SGYDYGSSYDYYGMDY

SEQ ID NO: 1586 - DNA, 378 bp, Mus sp.
gaggtgcagctgctcgagcagtctggagctgaactggtaaggcctgggacctcagtgaagatttcctgcaaggctactggatacaccttcactacttactggctaggttgggtaaagcagaggcctggacatggccttgagtggattggagagattcaccctggaggtggttatactaactacaatgagaagttcaagggcaaggccacactgactgcagacacatcctccagcacagcctacatgcagctcagcagactgacatctgatgactccgccatctattactgtgcaagatcggggtatgactacggtagtagttacgattactatggtatggactactggggccaagggaccacggtcaccgtctcctca

SEQ ID NO: 1587 - protein, 107 aa, Mus sp.
ELVMTQSPSSLSASLGERVSLTCRASQDIGSSLNWLQQEPDGTIKRLIYATSSLDSGVPKRFSGSRSGSDYSLTISSLESEDFVDYYCLQYASSPYTFGGGTKLEIK

SEQ ID NO: 1588 - protein, 11 aa, Mus sp.
RASQDIGSSLN

SEQ ID NO: 1589 - protein, 7 aa, Mus sp.
ATSSLDS

SEQ ID NO: 1590 - protein, 9 aa, Mus sp.
LQYASSPYT

SEQ ID NO: 1591 - DNA, 321 bp, Mus sp.
gagctcgtcatgacccagtctccatcctccttatctgcctctctgggagaaagagtcagtctcacttgtcgggcaagtcaggacattggtagtagcttaaactggcttcagcaggaaccagatggaactattaaacgcctgatctacgccacatccagtttagattctggtgtccccaaaaggttcagtggcagtaggtctgggtcagattattctctcaccatcagcagccttgagtctgaagattttgtagactattactgtctacaatatgctagttctccgtacacgttcggaggggggaccaagcttgagatcaaa

SEQ ID NO: 1592 - protein, 248 aa, Mus sp.
EVQLLEQSGAELVRPGTSVKISCKATGYTFTTYWLGWVKQRPGHGLEWIGEIHPGGGYTNYNEKFKGKATLTADTSSSTAYMQLSRLTSDDSAIYYCARSGYDYGSSYDYYGMDYWGQGTTVTVSSGGGGSGGGGSGGGGSELVMTQSPSSLSASLGERVSLTCRASQDIGSSLNWLQQEPDGTIKRLIYATSSLDSGVPKRFSGSRSGSDYSLTISSLESEDFVDYYCLQYASSPYTFGGGTKLEIK

SEQ ID NO: 1593 - DNA, 744 bp, Mus sp.
gaggtgcagctgctcgagcagtctggagctgaactggtaaggcctgggacctcagtgaagatttcctgcaaggctactggatacaccttcactacttactggctaggttgggtaaagcagaggcctggacatggccttgagtggattggagagattcaccctggaggtggttatactaactacaatgagaagttcaagggcaaggccacactgactgcagacacatcctccagcacagcctacatgcagctcagcagactgacatctgatgactccgccatctattactgtgcaagatcggggtatgactacggtagtagttacgattactatggtatggactactggggccaagggaccacggtcaccgtctcctcaggtggtggtggttctggcggcggcggctccggtggtggtggttctgagctcgtcatgacccagtctccatcctccttatctgcctctctgggagaaagagtcagtctcacttgtcgggcaagtcaggacattggtagtagcttaaactggcttcagcaggaaccagatggaactattaaacgcctgatctacgccacatccagtttagattctggtgtccccaaaaggttcagtggcagtaggtctgggtcagattattctctcaccatcagcagccttgagtctgaagattttgtagactattactgtctacaatatgctagttctccgtacacgttcggaggggggaccaagcttgagatcaaa

SEQ ID NO: 1594 - protein, 503 aa, Mus sp.
EVQLLEQSGAELVRPGTSVKISCKATGYTFTTYWLGWVKQRPGHGLEWIGEIHPGGGYTNYNEKFKGKATLTADTSSSTAYMQLSRLTSDDSAIYYCARSGYDYGSSYDYYGMDYWGQGTTVTVSSGGGGSGGGGSGGGGSELVMTQSPSSLSASLGERVSLTCRASQDIGSSLNWLQQEPDGTIKRLIYATSSLDSGVPKRFSGSRSGSDYSLTISSLESEDFVDYYCLQYASSPYTFGGGTKLEIKSGGGGSEVQLVESGGGLVQPGGSLKLSCAASGFTFNKYAMNWVRQAPGKGLEWVARIRSKYNNYATYYADSVKDRFTISRDDSKNTAYLQMNNLKTEDTAVYYCVRHGNFGNSYISYWAYWGQGTLVTVSSGGGGSGGGGSGGGGSQTVVTQEPSLTVSPGGTVTLTCGSSTGAVTSGNYPNWVQQKPGQAPRGLIGGTKFLAPGTPARFSGSLLGGKAALTLSGVQPEDEAEYYCVLWYSNRWVFGGGTKLTVL

SEQ ID NO: 1595 - DNA, 1509 bp, Mus sp.
gaggtgcagctgctcgagcagtctggagctgaactggtaaggcctgggacctcagtgaagatttcctgcaaggctactggatacaccttcactacttactggctaggttgggtaaagcagaggcctggacatggccttgagtggattggagagattcaccctggaggtggttatactaactacaatgagaagttcaagggcaaggccacactgactgcagacacatcctccagcacagcctacatgcagctcagcagactgacatctgatgactccgccatctattactgtgcaagatcggggtatgactacggtagtagttacgattactatggtatggactactggggccaagggaccacggtcaccgtctcctcaggtggtggtggttctggcggcggcggctccggtggtggtggttctgagctcgtcatgacccagtctccatcctccttatctgcctctctgggagaaagagtcagtctcacttgtcgggcaagtcaggacattggtagtagcttaaactggcttcagcaggaaccagatggaactattaaacgcctgatctacgccacatccagtttagattctggtgtccccaaaaggttcagtggcagtaggtctgggtcagattattctctcaccatcagcagccttgagtctgaagattttgtagactattactgtctacaatatgctagttctccgtacacgttcggaggggggaccaagcttgagatcaaatccggaggtggtggatccgaggtgcagctggtcgagtctggaggaggattggtgcagcctggagggtcattgaaactctcatgtgcagcctctggattcaccttcaataagtacgccatgaactgggtccgccaggctccaggaaagggtttggaatgggttgctcgcataagaagtaaatataataattatgcaacatattatgccgattcagtgaaagacaggttcaccatctccagagatgattcaaaaaacactgcctatctacaaatgaacaacttgaaaactgaggacactgccgtgtactactgtgtgagacatgggaacttcggtaatagctacatatcctactgggcttactggggccaagggactctggtcaccgtctcctcaggtggtggtggttctggcggcggcggctccggtggtggtggttctcagactgttgtgactcaggaaccttcactcaccgtatcacctggtggaacagtcacactcacttgtggctcctcgactggggctgttacatctggcaactacccaaactgggtccaacaaaaaccaggtcaggcaccccgtggtctaataggtgggactaagttcctcgcccccggtactcctgccagattctcaggctccctgcttggaggcaaggctgccctcaccctctcaggggtacagccagaggatgaggcagaatattactgtgttctatggtacagcaaccgctgggtgttcggtggaggaaccaaactgactgtccta

SEQ ID NO: 1596 - protein, 126 aa, Mus sp.; identical to SEQ ID NO: 1540

SEQ ID NO: 1597 - protein, 5 aa, Mus sp.
KYWIG

SEQ ID NO: 1598 - protein, 17 aa, Mus sp.
DIHPGGGFANYNEKFKG

SEQ ID NO: 1599 - protein, 16 aa, Mus sp.
SGYDYGSSYDYHGMDY

SEQ ID NO: 1600 - DNA, 378 bp, Mus sp.; identical to SEQ ID NO: 1544

SEQ ID NO: 1601 - protein, 113 aa, Mus sp.
ELVMTQSPSSLTVTAGEKVTMSCKSSQSLLNSGNQKNYLAWYQQKPGQPPKLLIYGASTRESGVPDRFTGSGSGTDFTLTISSVQAEDLADYFCQQHYSTPYTFGGGTKLEIK

SEQ ID NO: 1602 - protein, 17 aa, Mus sp.
KSSQSLLNSGNQKNYLA

SEQ ID NO: 1603 - protein, 7 aa, Mus sp.
GASTRES

SEQ ID NO: 1604 - protein, 9 aa, Mus sp.
QQHYSTPYT

SEQ ID NO: 1605 - DNA, 339 bp, Mus sp.
gagctcgtgatgacacagtctccatcctccctgactgtgacagcaggagagaaggtcactatgagctgcaagtccagtcagagtctgttaaacagtggaaatcaaaagaactacttggcctggtaccagcagaaaccagggcagcctcctaaactgttgatctacggggcatccactagggaatctggagtccctgatcgcttcacaggcagtggatctgggacagatttcactcttaccatcagcagtgtgcaggctgaagacctggcagattacttctgtcagcaacattatagcactccgtacacgttcggaggggggaccaagcttgagatcaaa

SEQ ID NO: 1606 - protein, 254 aa, Mus sp.
EVQLLEQSGAEVVRPGTSVKMSCKAAGYTFTKYWIGWVKQRPGHGLEWIGDIHPGGGFANYNEKFKGKATLTADTSSSTAYMQLSRLTSDDSAIYYCARSGYDYGSSYDYHGMDYWGQGTTVTVSSGGGGSGGGGSGGGGSELVMTQSPSSLTVTAGEKVTMSCKSSQSLLNSGNQKNYLAWYQQKPGQPPKLLIYGASTRESGVPDRFTGSGSGTDFTLTISSVQAEDLADYFCQQHYSTPYTFGGGTKLEIK

SEQ ID NO: 1607 - DNA, 762 bp, Mus sp.
gaggtgcagctgctcgagcagtctggagctgaggtggttaggcctgggacttcagtgaagatgtcctgcaaggctgctggatacaccttcactaagtactggataggttgggtaaagcagaggcctggacatggccttgagtggattggagatattcaccctggaggtggttttgctaactacaatgagaagttcaagggcaaggccacactgactgcagacacatcctccagcacagcctacatgcagctcagcagactgacatctgatgactctgccatctattactgtgcaagatcgggttatgactacggtagtagttacgattaccatggtatggactactggggccaagggaccacggtcaccgtctcctcaggtggtggtggttctggcggcggcggctccggtggtggtggttctgagctcgtgatgacacagtctccatcctccctgactgtgacagcaggagagaaggtcactatgagctgcaagtccagtcagagtctgttaaacagtggaaatcaaaagaactacttggcctggtaccagcagaaaccagggcagcctcctaaactgttgatctacggggcatccactagggaatctggagtccctgatcgcttcacaggcagtggatctgggacagatttcactcttaccatcagcagtgtgcaggctgaagacctggcagattacttctgtcagcaacattatagcactccgtacacgttcggaggggggaccaagcttgagatcaaa

SEQ ID NO: 1608 - protein, 509 aa, Mus sp.
EVQLLEQSGAEVVRPGTSVKMSCKAAGYTFTKYWIGWVKQRPGHGLEWIGDIHPGGGFANYNEKFKGKATLTADTSSSTAYMQLSRLTSDDSAIYYCARSGYDYGSSYDYHGMDYWGQGTTVTVSSGGGGSGGGGSGGGGSELVMTQSPSSLTVTAGEKVTMSCKSSQSLLNSGNQKNYLAWYQQKPGQPPKLLIYGASTRESGVPDRFTGSGSGTDFTLTISSVQAEDLADYFCQQHYSTPYTFGGGTKLEIKSGGGGSEVQLVESGGGLVQPGGSLKLSCAASGFTFNKYAMNWVRQAPGKGLEWVARIRSKYNNYATYYADSVKDRFTISRDDSKNTAYLQMNNLKTEDTAVYYCVRHGNFGNSYISYWAYWGQGTLVTVSSGGGGSGGGGSGGGGSQTVVTQEPSLTVSPGGTVTLTCGSSTGAVTSGNYPNWVQQKPGQAPRGLIGGTKFLAPGTPARFSGSLLGGKAALTLSGVQPEDEAEYYCVLWYSNRWVFGGGTKLTVL

SEQ ID NO: 1609 - DNA, 1527 bp, Mus sp.
gaggtgcagctgctcgagcagtctggagctgaggtggttaggcctgggacttcagtgaagatgtcctgcaaggctgctggatacaccttcactaagtactggataggttgggtaaagcagaggcctggacatggccttgagtggattggagatattcaccctggaggtggttttgctaactacaatgagaagttcaagggcaaggccacactgactgcagacacatcctccagcacagcctacatgcagctcagcagactgacatctgatgactctgccatctattactgtgcaagatcgggttatgactacggtagtagttacgattaccatggtatggactactggggccaagggaccacggtcaccgtctcctcaggtggtggtggttctggcggcggcggctccggtggtggtggttctgagctcgtgatgacacagtctccatcctccctgactgtgacagcaggagagaaggtcactatgagctgcaagtccagtcagagtctgttaaacagtggaaatcaaaagaactacttggcctggtaccagcagaaaccagggcagcctcctaaactgttgatctacggggcatccactagggaatctggagtccctgatcgcttcacaggcagtggatctgggacagatttcactcttaccatcagcagtgtgcaggctgaagacctggcagattacttctgtcagcaacattatagcactccgtacacgttcggaggggggaccaagcttgagatcaaatccggaggtggtggatccgaggtgcagctggtcgagtctggaggaggattggtgcagcctggagggtcattgaaactctcatgtgcagcctctggattcaccttcaataagtacgccatgaactgggtccgccaggctccaggaaagggtttggaatgggttgctcgcataagaagtaaatataataattatgcaacatattatgccgattcagtgaaagacaggttcaccatctccagagatgattcaaaaaacactgcctatctacaaatgaacaacttgaaaactgaggacactgccgtgtactactgtgtgagacatgggaacttcggtaatagctacatatcctactgggcttactggggccaagggactctggtcaccgtctcctcaggtggtggtggttctggcggcggcggctccggtggtggtggttctcagactgttgtgactcaggaaccttcactcaccgtatcacctggtggaacagtcacactcacttgtggctcctcgactggggctgttacatctggcaactacccaaactgggtccaacaaaaaccaggtcaggcaccccgtggtctaataggtgggactaagttcctcgcccccggtactcctgccagattctcaggctccctgcttggaggcaaggctgccctcaccctctcaggggtacagccagaggatgaggcagaatattactgtgttctatggtacagcaaccgctgggtgttcggtggaggaaccaaactgactgtccta

SEQ ID NO: 1610 - protein, 126 aa, Mus sp.
EVQLLEQSGADLVRPGTSVKLSCKAAGYTFSRYWISWIRQRPGHGLEWIGEIYPGGGYGNYNENFKDKVTLTADTSSSTAYMQLSSLTSEDSAIYYCARSGYDYGSKYDYYGLDYWGQGTTVTVSS

SEQ ID NO: 1611 - protein, 5 aa, Mus sp.
RYWIS

SEQ ID NO: 1612 - protein, 17 aa, Mus sp.
EIYPGGGYGNYNENFKD

SEQ ID NO: 1613 - protein, 16 aa, Mus sp.
SGYDYGSKYDYYGLDY

SEQ ID NO: 1614 - DNA, 378 bp, Mus sp.
gaggtgcagctgctcgagcagtctggagctgacctggtaaggcctgggacttcagtgaagctgtcctgcaaggctgctggatacaccttcagtaggtattggataagttggataaggcagaggcctggacatggccttgagtggattggagaaatttaccctggaggtggttatggtaactacaatgagaatttcaaggacaaggtcacactgactgcagacacatcctccagcacagcctatatgcagctcagcagcctgacatctgaggactctgccatctattattgtgcaagatcggggtatgactacggcagtaagtacgattattatggtttggactactggggccaagggaccacggtcaccgtctcctca

SEQ ID NO: 1615 - protein, 107 aa, Mus sp.
ELVMTQSPSSMYASLGERVTITCKASQDINSYLSWFQQKPGKSPKTLIYRANRLVDGVPSRFSGSGSGQDYSLTISSLEYEDMGIYYCLQYDAFPPTFGAGTKLEIK

SEQ ID NO: 1616 - protein, 11 aa, Mus sp.
KASQDINSYLS

SEQ ID NO: 1617 - protein, 7 aa, Mus sp.
RANRLVD

SEQ ID NO: 1618 - protein, 9 aa, Mus sp.
LQYDAFPPT

SEQ ID NO: 1619 - DNA, 321 bp, Mus sp.
gagctcgtgatgacacagtctccatcttccatgtatgcatctctaggagagagagtcactatcacttgcaaggcgagtcaggacattaatagctatttaagctggttccagcagaaaccagggaaatctcctaagaccctgatctatcgtgcaaacagattggtagatggggtcccatcaaggttcagtggcagtggatctgggcaagattattctctcaccatcagcagcctggagtatgaagatatgggaatttattattgtctacagtatgatgcgtttcctcccacgttcggtgctgggaccaagcttgagatcaaa

SEQ ID NO: 1620 - protein, 248 aa, Mus sp.
EVQLLEQSGADLVRPGTSVKLSCKAAGYTFSRYWISWIRQRPGHGLEWIGEIYPGGGYGNYNENFKDKVTLTADTSSSTAYMQLSSLTSEDSAIYYCARSGYDYGSKYDYYGLDYWGQGTTVTVSSGGGGSGGGGSGGGGSELVMTQSPSSMYASLGERVTITCKASQDINSYLSWFQQKPGKSPKTLIYRANRLVDGVPSRFSGSGSGQDYSLTISSLEYEDMGIYYCLQYDAFPPTFGAGTKLEIK

SEQ ID NO: 1621 - DNA, 744 bp, Mus sp.
gaggtgcagctgctcgagcagtctggagctgacctggtaaggcctgggacttcagtgaagctgtcctgcaaggctgctggatacaccttcagtaggtattggataagttggataaggcagaggcctggacatggccttgagtggattggagaaatttaccctggaggtggttatggtaactacaatgagaatttcaaggacaaggtcacactgactgcagacacatcctccagcacagcctatatgcagctcagcagcctgacatctgaggactctgccatctattattgtgcaagatcggggtatgactacggcagtaagtacgattattatggtttggactactggggccaagggaccacggtcaccgtctcctcaggtggtggtggttctggcggcggcggctccggtggtggtggttctgagctcgtgatgacacagtctccatcttccatgtatgcatctctaggagagagagtcactatcacttgcaaggcgagtcaggacattaatagctatttaagctggttccagcagaaaccagggaaatctcctaagaccctgatctatcgtgcaaacagattggtagatggggtcccatcaaggttcagtggcagtggatctgggcaagattattctctcaccatcagcagcctggagtatgaagatatgggaatttattattgtctacagtatgatgcgtttcctcccacgttcggtgctgggaccaagcttgagatcaaa

SEQ ID NO: 1622 - protein, 503 aa, Mus sp.
EVQLLEQSGADLVRPGTSVKLSCKAAGYTFSRYWISWIRQRPGHGLEWIGEIYPGGGYGNYNENFKDKVTLTADTSSSTAYMQLSSLTSEDSAIYYCARSGYDYGSKYDYYGLDYWGQGTTVTVSSGGGGSGGGGSGGGGSELVMTQSPSSMYASLGERVTITCKASQDINSYLSWFQQKPGKSPKTLIYRANRLVDGVPSRFSGSGSGQDYSLTISSLEYEDMGIYYCLQYDAFPPTFGAGTKLEIKSGGGGSEVQLVESGGGLVQPGGSLKLSCAASGFTFNKYAMNWVRQAPGKGLEWVARIRSKYNNYATYYADSVKDRFTISRDDSKNTAYLQMNNLKTEDTAVYYCVRHGNFGNSYISYWAYWGQGTLVTVSSGGGGSGGGGSGGGGSQTVVTQEPSLTVSPGGTVTLTCGSSTGAVTSGNYPNWVQQKPGQAPRGLIGGTKFLAPGTPARFSGSLLGGKAALTLSGVQPEDEAEYYCVLWYSNRWVFGGGTKLTVL

SEQ ID NO: 1623 - DNA, 1509 bp, Mus sp.
gaggtgcagctgctcgagcagtctggagctgacctggtaaggcctgggacttcagtgaagctgtcctgcaaggctgctggatacaccttcagtaggtattggataagttggataaggcagaggcctggacatggccttgagtggattggagaaatttaccctggaggtggttatggtaactacaatgagaatttcaaggacaaggtcacactgactgcagacacatcctccagcacagcctatatgcagctcagcagcctgacatctgaggactctgccatctattattgtgcaagatcggggtatgactacggcagtaagtacgattattatggtttggactactggggccaagggaccacggtcaccgtctcctcaggtggtggtggttctggcggcggcggctccggtggtggtggttctgagctcgtgatgacacagtctccatcttccatgtatgcatctctaggagagagagtcactatcacttgcaaggcgagtcaggacattaatagctatttaagctggttccagcagaaaccagggaaatctcctaagaccctgatctatcgtgcaaacagattggtagatggggtcccatcaaggttcagtggcagtggatctgggcaagattattctctcaccatcagcagcctggagtatgaagatatgggaatttattattgtctacagtatgatgcgtttcctcccacgttcggtgctgggaccaagcttgagatcaaatccggaggtggtggatccgaggtgcagctggtcgagtctggaggaggattggtgcagcctggagggtcattgaaactctcatgtgcagcctctggattcaccttcaataagtacgccatgaactgggtccgccaggctccaggaaagggtttggaatgggttgctcgcataagaagtaaatataataattatgcaacatattatgccgattcagtgaaagacaggttcaccatctccagagatgattcaaaaaacactgcctatctacaaatgaacaacttgaaaactgaggacactgccgtgtactactgtgtgagacatgggaacttcggtaatagctacatatcctactgggcttactggggccaagggactctggtcaccgtctcctcaggtggtggtggttctggcggcggcggctccggtggtggtggttctcagactgttgtgactcaggaaccttcactcaccgtatcacctggtggaacagtcacactcacttgtggctcctcgactggggctgttacatctggcaactacccaaactgggtccaacaaaaaccaggtcaggcaccccgtggtctaataggtgggactaagttcctcgcccccggtactcctgccagattctcaggctccctgcttggaggcaaggctgccctcaccctctcaggggtacagccagaggatgaggcagaatattactgtgttctatggtacagcaaccgctgggtgttcggtggaggaaccaaactgactgtccta

SEQ ID NO: 1624 - protein, 126 aa, Mus sp.; identical to SEQ ID NO: 1610

SEQ ID NO: 1625 - protein, 5 aa, Mus sp.
RYWIS

SEQ ID NO: 1626 - protein, 17 aa, Mus sp.
EIYPGGGYGNYNENFKD

SEQ ID NO: 1627 - protein, 16 aa, Mus sp.
SGYDYGSKYDYYGLDY

SEQ ID NO: 1628 - DNA, 378 bp, Mus sp.; identical to SEQ ID NO: 1614

SEQ ID NO: 1629 - protein, 107 aa, Mus sp.
ELVMTQSPSSLSASLGERVSLTCRASQEISGYLSWLQQKPDGTIKRLIYAASTLDSGVPKRFSGSRSGSDYSLTISSLESEDFADYYCLQYASSPYTFGGGTKLEIK

SEQ ID NO: 1630 - protein, 11 aa, Mus sp.
RASQEISGYLS

SEQ ID NO: 1631 - protein, 7 aa, Mus sp.
AASTLDS

SEQ ID NO: 1632 - protein, 9 aa, Mus sp.
LQYASSPYT

SEQ ID NO: 1633 - DNA, 321 bp, Mus sp.
gagctcgtcatgacccagtctccatcctccttatctgcctctctgggagaaagagtcagtctcacttgtcgggcaagtcaggaaattagtggttacttaagctggcttcagcagaaaccagatggaactattaaacgcctgatctacgccgcatccactttagattctggtgtcccaaaaaggttcagtggcagtaggtctgggtcagattattctctcaccatcagcagccttgagtctgaagattttgcagactattactgtctacaatatgctagttctccgtacacgttcggaggggggaccaagcttgagatcaaa

SEQ ID NO: 1634 - protein, 248 aa, Mus sp.
EVQLLEQSGADLVRPGTSVKLSCKAAGYTFSRYWISWIRQRPGHGLEWIGEIYPGGGYGNYNENFKDKVTLTADTSSSTAYMQLSSLTSEDSAIYYCARSGYDYGSKYDYYGLDYWGQGTTVTVSSGGGGSGGGGSGGGGSELVMTQSPSSLSASLGERVSLTCRASQEISGYLSWLQQKPDGTIKRLIYAASTLDSGVPKRFSGSRSGSDYSLTISSLESEDFADYYCLQYASSPYTFGGGTKLEIK

SEQ ID NO: 1635 - DNA, 744 bp, Mus sp.
gaggtgcagctgctcgagcagtctggagctgacctggtaaggcctgggacttcagtgaagctgtcctgcaaggctgctggatacaccttcagtaggtattggataagttggataaggcagaggcctggacatggccttgagtggattggagaaatttaccctggaggtggttatggtaactacaatgagaatttcaaggacaaggtcacactgactgcagacacatcctccagcacagcctatatgcagctcagcagcctgacatctgaggactctgccatctattattgtgcaagatcggggtatgactacggcagtaagtacgattattatggtttggactactggggccaagggaccacggtcaccgtctcctcaggtggtggtggttctggcggcggcggctccggtggtggtggttctgagctcgtcatgacccagtctccatcctccttatctgcctctctgggagaaagagtcagtctcacttgtcgggcaagtcaggaaattagtggttacttaagctggcttcagcagaaaccagatggaactattaaacgcctgatctacgccgcatccactttagattctggtgtcccaaaaaggttcagtggcagtaggtctgggtcagattattctctcaccatcagcagccttgagtctgaagattttgcagactattactgtctacaatatgctagttctccgtacacgttcggaggggggaccaagcttgagatcaaa

SEQ ID NO: 1636 - protein, 503 aa, Mus sp.
EVQLLEQSGADLVRPGTSVKLSCKAAGYTFSRYWISWIRQRPGHGLEWIGEIYPGGGYGNYNENFKDKVTLTADTSSSTAYMQLSSLTSEDSAIYYCARSGYDYGSKYDYYGLDYWGQGTTVTVSSGGGGSGGGGSGGGGSELVMTQSPSSLSASLGERVSLTCRASQEISGYLSWLQQKPDGTIKRLIYAASTLDSGVPKRFSGSRSGSDYSLTISSLESEDFADYYCLQYASSPYTFGGGTKLEIKSGGGGSEVQLVESGGGLVQPGGSLKLSCAASGFTFNKYAMNWVRQAPGKGLEWVARIRSKYNNYATYYADSVKDRFTISRDDSKNTAYLQMNNLKTEDTAVYYCVRHGNFGNSYISYWAYWGQGTLVTVSSGGGGSGGGGSGGGGSQTVVTQEPSLTVSPGGTVTLTCGSSTGAVTSGNYPNWVQQKPGQAPRGLIGGTKFLAPGTPARFSGSLLGGKAALTLSGVQPEDEAEYYCVLWYSNRWVFGGGTKLTVL

SEQ ID NO: 1637 - DNA, 1509 bp, Mus sp.
gaggtgcagctgctcgagcagtctggagctgacctggtaaggcctgggacttcagtgaagctgtcctgcaaggctgctggatacaccttcagtaggtattggataagttggataaggcagaggcctggacatggccttgagtggattggagaaatttaccctggaggtggttatggtaactacaatgagaatttcaaggacaaggtcacactgactgcagacacatcctccagcacagcctatatgcagctcagcagcctgacatctgaggactctgccatctattattgtgcaagatcggggtatgactacggcagtaagtacgattattatggtttggactactggggccaagggaccacggtcaccgtctcctcaggtggtggtggttctggcggcggcggctccggtggtggtggttctgagctcgtcatgacccagtctccatcctccttatctgcctctctgggagaaagagtcagtctcacttgtcgggcaagtcaggaaattagtggttacttaagctggcttcagcagaaaccagatggaactattaaacgcctgatctacgccgcatccactttagattctggtgtcccaaaaaggttcagtggcagtaggtctgggtcagattattctctcaccatcagcagccttgagtctgaagattttgcagactattactgtctacaatatgctagttctccgtacacgttcggaggggggaccaagcttgagatcaaatccggaggtggtggatccgaggtgcagctggtcgagtctggaggaggattggtgcagcctggagggtcattgaaactctcatgtgcagcctctggattcaccttcaataagtacgccatgaactgggtccgccaggctccaggaaagggtttggaatgggttgctcgcataagaagtaaatataataattatgcaacatattatgccgattcagtgaaagacaggttcaccatctccagagatgattcaaaaaacactgcctatctacaaatgaacaacttgaaaactgaggacactgccgtgtactactgtgtgagacatgggaacttcggtaatagctacatatcctactgggcttactggggccaagggactctggtcaccgtctcctcaggtggtggtggttctggcggcggcggctccggtggtggtggttctcagactgttgtgactcaggaaccttcactcaccgtatcacctggtggaacagtcacactcacttgtggctcctcgactggggctgttacatctggcaactacccaaactgggtccaacaaaaaccaggtcaggcaccccgtggtctaataggtgggactaagttcctcgcccccggtactcctgccagattctcaggctccctgcttggaggcaaggctgccctcaccctctcaggggtacagccagaggatgaggcagaatattactgtgttctatggtacagcaaccgctgggtgttcggtggaggaaccaaactgactgtccta

SEQ ID NO: 1638 - protein, 126 aa, Mus sp.
EVQLLEQSGAELMKPGASVKISCKATGYTFSNYWIGWVKQRPGHGLEWIGDIYPGGSYTNYNEKFKGKVTLTADTSSRTAYMQLSSLTFEDSAIYYCARSGYDYASDYDYHGMDYWGQGTTVTVSS

SEQ ID NO: 1639 - protein, 5 aa, Mus sp.
NYWIG

SEQ ID NO: 1640 - protein, 17 aa, Mus sp.
DIYPGGSYTNYNEKFKG

SEQ ID NO: 1641 - protein, 16 aa, Mus sp.
SGYDYASDYDYHGMDY

SEQ ID NO: 1642 - DNA, 378 bp, Mus sp.
gaggtgcagctgctcgagcagtctggagctgagctgatgaagcctggggcctcagtgaagatatcctgcaaggctactggatacaccttcagtaattactggataggttgggtaaagcagaggcctggacatggccttgagtggattggagatatttaccctggaggtagttatactaactacaatgagaaattcaagggcaaggtcacactgactgcagacacatcctccaggacagcctacatgcagctcagcagcctgacatttgaggactctgccatctattactgtgcaagatcggggtatgactacgctagtgactacgattaccatggtatggactactggggccaagggaccacggtcaccgtctcctca

SEQ ID NO: 1643 - protein, 107 aa, Mus sp.
ELVLTQSPSSMSASLGDRITITCQATQDIVKNLNWYQQKPGKPPSFLIYYATELAEGVPSRFSGSGSGSDYSLTISNLESEDFADYYCLQFYEFPYTFGGGTKLEIK

SEQ ID NO: 1644 - protein, 11 aa, Mus sp.
QATQDIVKNLN

SEQ ID NO: 1645 - protein, 7 aa, Mus sp.
YATELAE

SEQ ID NO: 1646 - protein, 9 aa, Mus sp.
LQFYEFPYT

SEQ ID NO: 1647 - DNA, 321 bp, Mus sp.
gagctcgtgctcacccagtctccatcctctatgtctgcatctctgggagacagaataaccatcacttgccaggcaactcaagacattgttaagaatttaaactggtatcagcagaaaccagggaaacccccttcattcctgatctattatgcaactgaactggcagaaggggtcccatcaaggttcagtggcagtgggtctgggtcagactattctctgacaatcagcaacctggagtctgaagattttgcagactattactgtctacagttttatgagtttccgtacacgttcggaggggggaccaagcttgagatcaaa

SEQ ID NO: 1648 - protein, 248 aa, Mus sp.
EVQLLEQSGAELMKPGASVKISCKATGYTFSNYWIGWVKQRPGHGLEWIGDIYPGGSYTNYNEKFKGKVTLTADTSSRTAYMQLSSLTFEDSAIYYCARSGYDYASDYDYHGMDYWGQGTTVTVSSGGGGSGGGGSGGGGSELVLTQSPSSMSASLGDRITITCQATQDIVKNLNWYQQKPGKPPSFLIYYATELAEGVPSRFSGSGSGSDYSLTISNLESEDFADYYCLQFYEFPYTFGGGTKLEIK

SEQ ID NO: 1649 - DNA, 744 bp, Mus sp.
gaggtgcagctgctcgagcagtctggagctgagctgatgaagcctggggcctcagtgaagatatcctgcaaggctactggatacaccttcagtaattactggataggttgggtaaagcagaggcctggacatggccttgagtggattggagatatttaccctggaggtagttatactaactacaatgagaaattcaagggcaaggtcacactgactgcagacacatcctccaggacagcctacatgcagctcagcagcctgacatttgaggactctgccatctattactgtgcaagatcggggtatgactacgctagtgactacgattaccatggtatggactactggggccaagggaccacggtcaccgtctcctcaggtggtggtggttctggcggcggcggctccggtggtggtggttctgagctcgtgctcacccagtctccatcctctatgtctgcatctctgggagacagaataaccatcacttgccaggcaactcaagacattgttaagaatttaaactggtatcagcagaaaccagggaaacccccttcattcctgatctattatgcaactgaactggcagaaggggtcccatcaaggttcagtggcagtgggtctgggtcagactattctctgacaatcagcaacctggagtctgaagattttgcagactattactgtctacagttttatgagtttccgtacacgttcggaggggggaccaagcttgagatcaaa

SEQ ID NO: 1650 - protein, 503 aa, Mus sp.
EVQLLEQSGAELMKPGASVKISCKATGYTFSNYWIGWVKQRPGHGLEWIGDIYPGGSYTNYNEKFKGKVTLTADTSSRTAYMQLSSLTFEDSAIYYCARSGYDYASDYDYHGMDYWGQGTTVTVSSGGGGSGGGGSGGGGSELVLTQSPSSMSASLGDRITITCQATQDIVKNLNWYQQKPGKPPSFLIYYATELAEGVPSRFSGSGSGSDYSLTISNLESEDFADYYCLQFYEFPYTFGGGTKLEIKSGGGGSEVQLVESGGGLVQPGGSLKLSCAASGFTFNKYAMNWVRQAPGKGLEWVARIRSKYNNYATYYADSVKDRFTISRDDSKNTAYLQMNNLKTEDTAVYYCVRHGNFGNSYISYWAYWGQGTLVTVSSGGGGSGGGGSGGGGSQTVVTQEPSLTVSPGGTVTLTCGSSTGAVTSGNYPNWVQQKPGQAPRGLIGGTKFLAPGTPARFSGSLLGGKAALTLSGVQPEDEAEYYCVLWYSNRWVFGGGTKLTVL

SEQ ID NO: 1651 - DNA, 1509 bp, Mus sp.
gaggtgcagctgctcgagcagtctggagctgagctgatgaagcctggggcctcagtgaagatatcctgcaaggctactggatacaccttcagtaattactggataggttgggtaaagcagaggcctggacatggccttgagtggattggagatatttaccctggaggtagttatactaactacaatgagaaattcaagggcaaggtcacactgactgcagacacatcctccaggacagcctacatgcagctcagcagcctgacatttgaggactctgccatctattactgtgcaagatcggggtatgactacgctagtgactacgattaccatggtatggactactggggccaagggaccacggtcaccgtctcctcaggtggtggtggttctggcggcggcggctccggtggtggtggttctgagctcgtgctcacccagtctccatcctctatgtctgcatctctgggagacagaataaccatcacttgccaggcaactcaagacattgttaagaatttaaactggtatcagcagaaaccagggaaacccccttcattcctgatctattatgcaactgaactggcagaaggggtcccatcaaggttcagtggcagtgggtctgggtcagactattctctgacaatcagcaacctggagtctgaagattttgcagactattactgtctacagttttatgagtttccgtacacgttcggaggggggaccaagcttgagatcaaatccggaggtggtggatccgaggtgcagctggtcgagtctggaggaggattggtgcagcctggagggtcattgaaactctcatgtgcagcctctggattcaccttcaataagtacgccatgaactgggtccgccaggctccaggaaagggtttggaatgggttgctcgcataagaagtaaatataataattatgcaacatattatgccgattcagtgaaagacaggttcaccatctccagagatgattcaaaaaacactgcctatctacaaatgaacaacttgaaaactgaggacactgccgtgtactactgtgtgagacatgggaacttcggtaatagctacatatcctactgggcttactggggccaagggactctggtcaccgtctcctcaggtggtggtggttctggcggcggcggctccggtggtggtggttctcagactgttgtgactcaggaaccttcactcaccgtatcacctggtggaacagtcacactcacttgtggctcctcgactggggctgttacatctggcaactacccaaactgggtccaacaaaaaccaggtcaggcaccccgtggtctaataggtgggactaagttcctcgcccccggtactcctgccagattctcaggctccctgcttggaggcaaggctgccctcaccctctcaggggtacagccagaggatgaggcagaatattactgtgttctatggtacagcaaccgctgggtgttcggtggaggaaccaaactgactgtccta

SEQ ID NO: 1652 - protein, 124 aa, Artificial Sequence
  EN00B12-H
QVQLVQSGPEVKKPGASVKLSCKASGYTFTDYVIHWVKQAPGQRLEWMGYINPYDDDTTYNQKFKGRVTITVDTSASTAYMELNSLRSEDTAVYYCARRGNSYDGYFDYSMDYWGQGTLVTVSS

SEQ ID NO: 1653 - protein, 5 aa, Artificial Sequence
  EN00B12-HCDR1
DYVIH

SEQ ID NO: 1654 - protein, 17 aa, Artificial Sequence
  EN00B12-HCDR2
YINPYDDDTTYNQKFKG

SEQ ID NO: 1655 - protein, 15 aa, Artificial Sequence
  EN00B12-HCDR3
RGNSYDGYFDYSMDY

SEQ ID NO: 1656 - DNA, 372 bp, Artificial Sequence
  EN00B12-H
caggtgcagctggtccagtcaggacctgaggtgaagaagcctggggcttcagtgaagttgtcctgcaaggcttctggatacacattcactgactatgttatacactgggtgaagcaggcacctggacagcgccttgagtggatgggatatattaatccttatgatgatgatactacctacaaccagaagttcaagggccgggtcacaattactgtagacacatccgccagcacagcctacatggagctcaacagcctgagatctgaggacactgcagtctattactgtgcaagaagggggaactcctatgatggttacttcgactattctatggactactggggtcaaggaaccttggtcaccgtctcctca

SEQ ID NO: 1657 - protein, 108 aa, Artificial Sequence
  EN00B12-L
DIQLTQSPSFLSASVGDRVTITCRASQNVGTAVAWYQQKPGKAPKLLIYSASNRYTGVPSRFSGSGSGTEFTLTISSLQPEDFATYYCQQYTNYPMYTFGQGTKLEIK

SEQ ID NO: 1658 - protein, 11 aa, Artificial Sequence
  EN00B12-LCDR1
RASQNVGTAVA

SEQ ID NO: 1659 - protein, 7 aa, Artificial Sequence
  EN00B12-LCDR2
SASNRYT

SEQ ID NO: 1660 - protein, 10 aa, Artificial Sequence
  EN00B12-LCDR3
QQYTNYPMYT

SEQ ID NO: 1661 - DNA, 324 bp, Artificial Sequence
  EN00B12-L
gacatccagctgacccagtctccaagcttcctgtccgcatcagtaggagacagagtcaccatcacctgcagggccagtcagaatgtgggtactgctgtagcctggtatcaacagaaaccaggaaaagcccctaaattactgatttactcggcatcgaatcggtacactggagtccctagtcgcttctcaggcagtggatctgggacagagttcactctcaccatcagcagtctgcagcctgaagacttcgcaacttattactgccagcaatataccaactatcccatgtatacgtttggacaggggaccaagctggaaataaaa

SEQ ID NO: 1662 - protein, 247 aa, Artificial Sequence
  EN00B12-HL
QVQLVQSGPEVKKPGASVKLSCKASGYTFTDYVIHWVKQAPGQRLEWMGYINPYDDDTTYNQKFKGRVTITVDTSASTAYMELNSLRSEDTAVYYCARRGNSYDGYFDYSMDYWGQGTLVTVSSGGGGSGGGGSGGGGSDIQLTQSPSFLSASVGDRVTITCRASQNVGTAVAWYQQKPGKAPKLLIYSASNRYTGVPSRFSGSGSGTEFTLTISSLQPEDFATYYCQQYTNYPMYTFGQGTKLEIK

SEQ ID NO: 1663 - DNA, 741 bp, Artificial Sequence
  EN00B12-HL
caggtgcagctggtccagtcaggacctgaggtgaagaagcctggggcttcagtgaagttgtcctgcaaggcttctggatacacattcactgactatgttatacactgggtgaagcaggcacctggacagcgccttgagtggatgggatatattaatccttatgatgatgatactacctacaaccagaagttcaagggccgggtcacaattactgtagacacatccgccagcacagcctacatggagctcaacagcctgagatctgaggacactgcagtctattactgtgcaagaagggggaactcctatgatggttacttcgactattctatggactactggggtcaaggaaccttggtcaccgtctcctcaggtggtggtggttctggcggcggcggctccggtggtggtggttctgacatccagctgacccagtctccaagcttcctgtccgcatcagtaggagacagagtcaccatcacctgcagggccagtcagaatgtgggtactgctgtagcctggtatcaacagaaaccaggaaaagcccctaaattactgatttactcggcatcgaatcggtacactggagtccctagtcgcttctcaggcagtggatctgggacagagttcactctcaccatcagcagtctgcagcctgaagacttcgcaacttattactgccagcaatataccaactatcccatgtatacgtttggacaggggaccaagctggaaataaaa

SEQ ID NO: 1664 - protein, 502 aa, Artificial Sequence
  EN00B12 HL x I2C HL
QVQLVQSGPEVKKPGASVKLSCKASGYTFTDYVIHWVKQAPGQRLEWMGYINPYDDDTTYNQKFKGRVTITVDTSASTAYMELNSLRSEDTAVYYCARRGNSYDGYFDYSMDYWGQGTLVTVSSGGGGSGGGGSGGGGSDIQLTQSPSFLSASVGDRVTITCRASQNVGTAVAWYQQKPGKAPKLLIYSASNRYTGVPSRFSGSGSGTEFTLTISSLQPEDFATYYCQQYTNYPMYTFGQGTKLEIKSGGGGSEVQLVESGGGLVQPGGSLKLSCAASGFTFNKYAMNWVRQAPGKGLEWVARIRSKYNNYATYYADSVKDRFTISRDDSKNTAYLQMNNLKTEDTAVYYCVRHGNFGNSYISYWAYWGQGTLVTVSSGGGGSGGGGSGGGGSQTVVTQEPSLTVSPGGTVTLTCGSSTGAVTSGNYPNWVQQKPGQAPRGLIGGTKFLAPGTPARFSGSLLGGKAALTLSGVQPEDEAEYYCVLWYSNRWVFGGGTKLTVL

SEQ ID NO: 1665 - DNA, 1506 bp, Artificial Sequence
  EN00B12 HL x I2C HL
caggtgcagctggtccagtcaggacctgaggtgaagaagcctggggcttcagtgaagttgtcctgcaaggcttctggatacacattcactgactatgttatacactgggtgaagcaggcacctggacagcgccttgagtggatgggatatattaatccttatgatgatgatactacctacaaccagaagttcaagggccgggtcacaattactgtagacacatccgccagcacagcctacatggagctcaacagcctgagatctgaggacactgcagtctattactgtgcaagaagggggaactcctatgatggttacttcgactattctatggactactggggtcaaggaaccttggtcaccgtctcctcaggtggtggtggttctggcggcggcggctccggtggtggtggttctgacatccagctgacccagtctccaagcttcctgtccgcatcagtaggagacagagtcaccatcacctgcagggccagtcagaatgtgggtactgctgtagcctggtatcaacagaaaccaggaaaagcccctaaattactgatttactcggcatcgaatcggtacactggagtccctagtcgcttctcaggcagtggatctgggacagagttcactctcaccatcagcagtctgcagcctgaagacttcgcaacttattactgccagcaatataccaactatcccatgtatacgtttggacaggggaccaagctggaaataaaatccggaggtggtggatccgaggtgcagctggtcgagtctggaggaggattggtgcagcctggagggtcattgaaactctcatgtgcagcctctggattcaccttcaataagtacgccatgaactgggtccgccaggctccaggaaagggtttggaatgggttgctcgcataagaagtaaatataataattatgcaacatattatgccgattcagtgaaagacaggttcaccatctccagagatgattcaaaaaacactgcctatctacaaatgaacaacttgaaaactgaggacactgccgtgtactactgtgtgagacatgggaacttcggtaatagctacatatcctactgggcttactggggccaagggactctggtcaccgtctcctcaggtggtggtggttctggcggcggcggctccggtggtggtggttctcagactgttgtgactcaggaaccttcactcaccgtatcacctggtggaacagtcacactcacttgtggctcctcgactggggctgttacatctggcaactacccaaactgggtccaacaaaaaccaggtcaggcaccccgtggtctaataggtgggactaagttcctcgcccccggtactcctgccagattctcaggctccctgcttggaggcaaggctgccctcaccctctcaggggtacagccagaggatgaggcagaatattactgtgttctatggtacagcaaccgctgggtgttcggtggaggaaccaaactgactgtccta

SEQ ID NO: 1666 - protein, 124 aa, Artificial Sequence
  EN00C3-H
QVQLVQSGPEVKKPGASVKMSCKASGYTFTDYVIHWVRQGPGQRLEWMGYINPYDDDTTYNQKFKGRVTMTLDKSASTAYMQLNSLRSEDTAVYYCARRGNSYDGYFDYSMDYWGQGTLVTVSS

SEQ ID NO: 1667 - protein, 5 aa, Artificial Sequence
  EN00C3-HCDR1
DYVIH

SEQ ID NO: 1668 - protein, 17 aa, Artificial Sequence
  EN00C3-HCDR2
YINPYDDDTTYNQKFKG

SEQ ID NO: 1669 - protein, 15 aa, Artificial Sequence
  EN00C3-HCDR3
RGNSYDGYFDYSMDY

SEQ ID NO: 1670 - DNA, 372 bp, Artificial Sequence
  EN00C3-H
caggtgcagctggtccagtcaggacctgaggtgaagaagcctggggcttcagtgaagatgtcctgcaaggcttctggatacacattcactgactatgttatacactgggtgaggcagggacctggacagcgtcttgagtggatgggatatattaatccttatgatgatgatactacctacaaccagaagttcaagggccgggtcacaatgactctagacaaatccgccagcacagcctacatgcaactcaacagcctgagatctgaggacactgcagtctattactgtgcaagaagggggaactcctatgatggttacttcgactattctatggactactggggtcaaggaaccttggtcaccgtctcctca

SEQ ID NO: 1671 - protein, 108 aa, Artificial Sequence
  EN00C3-L
DIQLTQSPNFLSASVGDRVTITCRASQNVGTAVAWYQQKPGKAPKLLIYSASNRYTGVPSRFSGSGSGTDFTLTISSLQPEDFATYYCQQYTNYPMYTFGQGTKLEIK

SEQ ID NO: 1672 - protein, 11 aa, Artificial Sequence
  EN00C3-LCDR1
RASQNVGTAVA

SEQ ID NO: 1673 - protein, 7 aa, Artificial Sequence
  EN00C3-LCDR2
SASNRYT

SEQ ID NO: 1674 - protein, 10 aa, Artificial Sequence
  EN00C3-LCDR3
QQYTNYPMYT

SEQ ID NO: 1675 - DNA, 324 bp, Artificial Sequence
  EN00C3-L
gacatccagctgacccagtctccaaacttcctgtccgcatcagtaggagacagagtcaccatcacctgcagggccagtcagaatgtgggtactgctgtagcctggtatcaacagaaaccaggaaaagcccctaaattactgatttactcggcatcgaatcggtacactggagtccctagtcgcttctcaggcagtggatctgggacagatttcactctcaccatcagcagtctgcagcctgaagacttcgcaacttattactgccagcaatataccaactatcccatgtatacgtttggacaggggaccaagctggaaataaaa

SEQ ID NO: 1676 - protein, 247 aa, Artificial Sequence
  EN00C3-HL
QVQLVQSGPEVKKPGASVKMSCKASGYTFTDYVIHWVRQGPGQRLEWMGYINPYDDDTTYNQKFKGRVTMTLDKSASTAYMQLNSLRSEDTAVYYCARRGNSYDGYFDYSMDYWGQGTLVTVSSGGGGSGGGGSGGGGSDIQLTQSPNFLSASVGDRVTITCRASQNVGTAVAWYQQKPGKAPKLLIYSASNRYTGVPSRFSGSGSGTDFTLTISSLQPEDFATYYCQQYTNYPMYTFGQGTKLEIK

SEQ ID NO: 1677 - DNA, 741 bp, Artificial Sequence
  EN00C3-HL
caggtgcagctggtccagtcaggacctgaggtgaagaagcctggggcttcagtgaagatgtcctgcaaggcttctggatacacattcactgactatgttatacactgggtgaggcagggacctggacagcgtcttgagtggatgggatatattaatccttatgatgatgatactacctacaaccagaagttcaagggccgggtcacaatgactctagacaaatccgccagcacagcctacatgcaactcaacagcctgagatctgaggacactgcagtctattactgtgcaagaagggggaactcctatgatggttacttcgactattctatggactactggggtcaaggaaccttggtcaccgtctcctcaggtggtggtggttctggcggcggcggctccggtggtggtggttctgacatccagctgacccagtctccaaacttcctgtccgcatcagtaggagacagagtcaccatcacctgcagggccagtcagaatgtgggtactgctgtagcctggtatcaacagaaaccaggaaaagcccctaaattactgatttactcggcatcgaatcggtacactggagtccctagtcgcttctcaggcagtggatctgggacagatttcactctcaccatcagcagtctgcagcctgaagacttcgcaacttattactgccagcaatataccaactatcccatgtatacgtttggacaggggaccaagctggaaataaaa

SEQ ID NO: 1678 - protein, 502 aa, Artificial Sequence
  EN00C3 HL x I2C HL
QVQLVQSGPEVKKPGASVKMSCKASGYTFTDYVIHWVRQGPGQRLEWMGYINPYDDDTTYNQKFKGRVTMTLDKSASTAYMQLNSLRSEDTAVYYCARRGNSYDGYFDYSMDYWGQGTLVTVSSGGGGSGGGGSGGGGSDIQLTQSPNFLSASVGDRVTITCRASQNVGTAVAWYQQKPGKAPKLLIYSASNRYTGVPSRFSGSGSGTDFTLTISSLQPEDFATYYCQQYTNYPMYTFGQGTKLEIKSGGGGSEVQLVESGGGLVQPGGSLKLSCAASGFTFNKYAMNWVRQAPGKGLEWVARIRSKYNNYATYYADSVKDRFTISRDDSKNTAYLQMNNLKTEDTAVYYCVRHGNFGNSYISYWAYWGQGTLVTVSSGGGGSGGGGSGGGGSQTVVTQEPSLTVSPGGTVTLTCGSSTGAVTSGNYPNWVQQKPGQAPRGLIGGTKFLAPGTPARFSGSLLGGKAALTLSGVQPEDEAEYYCVLWYSNRWVFGGGTKLTVL

SEQ ID NO: 1679 - DNA, 1506 bp, Artificial Sequence
  EN00C3 HL x I2C HL
caggtgcagctggtccagtcaggacctgaggtgaagaagcctggggcttcagtgaagatgtcctgcaaggcttctggatacacattcactgactatgttatacactgggtgaggcagggacctggacagcgtcttgagtggatgggatatattaatccttatgatgatgatactacctacaaccagaagttcaagggccgggtcacaatgactctagacaaatccgccagcacagcctacatgcaactcaacagcctgagatctgaggacactgcagtctattactgtgcaagaagggggaactcctatgatggttacttcgactattctatggactactggggtcaaggaaccttggtcaccgtctcctcaggtggtggtggttctggcggcggcggctccggtggtggtggttctgacatccagctgacccagtctccaaacttcctgtccgcatcagtaggagacagagtcaccatcacctgcagggccagtcagaatgtgggtactgctgtagcctggtatcaacagaaaccaggaaaagcccctaaattactgatttactcggcatcgaatcggtacactggagtccctagtcgcttctcaggcagtggatctgggacagatttcactctcaccatcagcagtctgcagcctgaagacttcgcaacttattactgccagcaatataccaactatcccatgtatacgtttggacaggggaccaagctggaaataaaatccggaggtggtggatccgaggtgcagctggtcgagtctggaggaggattggtgcagcctggagggtcattgaaactctcatgtgcagcctctggattcaccttcaataagtacgccatgaactgggtccgccaggctccaggaaagggtttggaatgggttgctcgcataagaagtaaatataataattatgcaacatattatgccgattcagtgaaagacaggttcaccatctccagagatgattcaaaaaacactgcctatctacaaatgaacaacttgaaaactgaggacactgccgtgtactactgtgtgagacatgggaacttcggtaatagctacatatcctactgggcttactggggccaagggactctggtcaccgtctcctcaggtggtggtggttctggcggcggcggctccggtggtggtggttctcagactgttgtgactcaggaaccttcactcaccgtatcacctggtggaacagtcacactcacttgtggctcctcgactggggctgttacatctggcaactacccaaactgggtccaacaaaaaccaggtcaggcaccccgtggtctaataggtgggactaagttcctcgcccccggtactcctgccagattctcaggctccctgcttggaggcaaggctgccctcaccctctcaggggtacagccagaggatgaggcagaatattactgtgttctatggtacagcaaccgctgggtgttcggtggaggaaccaaactgactgtccta

SEQ ID NO: 1680 - protein, 124 aa, Artificial Sequence
  EN01D5-H
QVQLVQSGPEVMKPGASVKMSCKASGYTFTDYVIHWVRQAPGKRLEWMGYINPYDDDTTYNQKFKGRVTITVDKSASTAYMELNSLTSEDTAVYYCARRGNSYDGYFDYSMDYWGQGTLVTVSS

SEQ ID NO: 1681 - protein, 5 aa, Artificial Sequence
  EN01D5-HCDR1
DYVIH

SEQ ID NO: 1682 - protein, 17 aa, Artificial Sequence
  EN01D5-HCDR2
YINPYDDDTTYNQKFKG

SEQ ID NO: 1683 - protein, 15 aa, Artificial Sequence
  EN01D5-HCDR3
RGNSYDGYFDYSMDY

SEQ ID NO: 1684 - DNA, 372 bp, Artificial Sequence; identical to SEQ ID NO: 1246
  EN01D5-H

SEQ ID NO: 1685 - protein, 108 aa, Artificial Sequence
  EN01D5-L
DIQLTQSPSFMSASVGDRVTITCRASQNVGTAVAWYQQKPGQAPKLLIYSASNRYTGVPSRFSGSGSGTEFTLTISSLQSEDFATYYCQQYTNYPMYTFGQGTKLEIK

SEQ ID NO: 1686 - protein, 11 aa, Artificial Sequence
  EN01D5-LCDR1
RASQNVGTAVA

SEQ ID NO: 1687 - protein, 7 aa, Artificial Sequence
  EN01D5-LCDR2
SASNRYT

SEQ ID NO: 1688 - protein, 10 aa, Artificial Sequence
  EN01D5-LCDR3
QQYTNYPMYT

SEQ ID NO: 1689 - DNA, 324 bp, Artificial Sequence
  EN01D5-L
gacatccagctgacccagtctccaagcttcatgtccgcatcagtaggagacagagtcaccatcacctgcagggccagtcagaatgtgggtactgctgtagcctggtatcaacagaaaccaggacaagcccctaaattactgatttactcggcatcgaatcggtacactggagtccctagtcgcttctcaggcagtggatctgggacagagttcactctcaccatcagcagtctgcagtctgaagacttcgcaacttattactgccagcaatataccaactatcccatgtatacgtttggacaggggaccaagctggaaataaaa

SEQ ID NO: 1690 - protein, 247 aa, Artificial Sequence
  EN01D5-HL
QVQLVQSGPEVMKPGASVKMSCKASGYTFTDYVIHWVRQAPGKRLEWMGYINPYDDDTTYNQKFKGRVTITVDKSASTAYMELNSLTSEDTAVYYCARRGNSYDGYFDYSMDYWGQGTLVTVSSGGGGSGGGGSGGGGSDIQLTQSPSFMSASVGDRVTITCRASQNVGTAVAWYQQKPGQAPKLLIYSASNRYTGVPSRFSGSGSGTEFTLTISSLQSEDFATYYCQQYTNYPMYTFGQGTKLEIK

SEQ ID NO: 1691 - DNA, 741 bp, Artificial Sequence
  EN01D5-HL
caggtgcagctggtccagtcaggacctgaggtgatgaagcctggggcttcagtgaagatgtcctgcaaggcttctggatacacattcactgactatgttatacactgggtgaggcaggcacctggaaagcgccttgagtggatgggatatattaatccttatgatgatgatactacctacaaccagaagttcaagggccgggtcacaattactgtagacaaatccgccagcacagcctacatggaactcaacagcctgacatctgaggacactgcagtctattactgtgcaagaagggggaactcctatgatggttacttcgactattctatggactactggggtcaaggaaccttggtcaccgtctcctcaggtggtggtggttctggcggcggcggctccggtggtggtggttctgacatccagctgacccagtctccaagcttcatgtccgcatcagtaggagacagagtcaccatcacctgcagggccagtcagaatgtgggtactgctgtagcctggtatcaacagaaaccaggacaagcccctaaattactgatttactcggcatcgaatcggtacactggagtccctagtcgcttctcaggcagtggatctgggacagagttcactctcaccatcagcagtctgcagtctgaagacttcgcaacttattactgccagcaatataccaactatcccatgtatacgtttggacaggggaccaagctggaaataaaa

SEQ ID NO: 1692 - protein, 502 aa, Artificial Sequence
  EN01D5 HL x I2C HL
QVQLVQSGPEVMKPGASVKMSCKASGYTFTDYVIHWVRQAPGKRLEWMGYINPYDDDTTYNQKFKGRVTITVDKSASTAYMELNSLTSEDTAVYYCARRGNSYDGYFDYSMDYWGQGTLVTVSSGGGGSGGGGSGGGGSDIQLTQSPSFMSASVGDRVTITCRASQNVGTAVAWYQQKPGQAPKLLIYSASNRYTGVPSRFSGSGSGTEFTLTISSLQSEDFATYYCQQYTNYPMYTFGQGTKLEIKSGGGGSEVQLVESGGGLVQPGGSLKLSCAASGFTFNKYAMNWVRQAPGKGLEWVARIRSKYNNYATYYADSVKDRFTISRDDSKNTAYLQMNNLKTEDTAVYYCVRHGNFGNSYISYWAYWGQGTLVTVSSGGGGSGGGGSGGGGSQTVVTQEPSLTVSPGGTVTLTCGSSTGAVTSGNYPNWVQQKPGQAPRGLIGGTKFLAPGTPARFSGSLLGGKAALTLSGVQPEDEAEYYCVLWYSNRWVFGGGTKLTVL

SEQ ID NO: 1693 - DNA, 1506 bp, Artificial Sequence
  EN01D5 HL x I2C HL
caggtgcagctggtccagtcaggacctgaggtgatgaagcctggggcttcagtgaagatgtcctgcaaggcttctggatacacattcactgactatgttatacactgggtgaggcaggcacctggaaagcgccttgagtggatgggatatattaatccttatgatgatgatactacctacaaccagaagttcaagggccgggtcacaattactgtagacaaatccgccagcacagcctacatggaactcaacagcctgacatctgaggacactgcagtctattactgtgcaagaagggggaactcctatgatggttacttcgactattctatggactactggggtcaaggaaccttggtcaccgtctcctcaggtggtggtggttctggcggcggcggctccggtggtggtggttctgacatccagctgacccagtctccaagcttcatgtccgcatcagtaggagacagagtcaccatcacctgcagggccagtcagaatgtgggtactgctgtagcctggtatcaacagaaaccaggacaagcccctaaattactgatttactcggcatcgaatcggtacactggagtccctagtcgcttctcaggcagtggatctgggacagagttcactctcaccatcagcagtctgcagtctgaagacttcgcaacttattactgccagcaatataccaactatcccatgtatacgtttggacaggggaccaagctggaaataaaatccggaggtggtggatccgaggtgcagctggtcgagtctggaggaggattggtgcagcctggagggtcattgaaactctcatgtgcagcctctggattcaccttcaataagtacgccatgaactgggtccgccaggctccaggaaagggtttggaatgggttgctcgcataagaagtaaatataataattatgcaacatattatgccgattcagtgaaagacaggttcaccatctccagagatgattcaaaaaacactgcctatctacaaatgaacaacttgaaaactgaggacactgccgtgtactactgtgtgagacatgggaacttcggtaatagctacatatcctactgggcttactggggccaagggactctggtcaccgtctcctcaggtggtggtggttctggcggcggcggctccggtggtggtggttctcagactgttgtgactcaggaaccttcactcaccgtatcacctggtggaacagtcacactcacttgtggctcctcgactggggctgttacatctggcaactacccaaactgggtccaacaaaaaccaggtcaggcaccccgtggtctaataggtgggactaagttcctcgcccccggtactcctgccagattctcaggctccctgcttggaggcaaggctgccctcaccctctcaggggtacagccagaggatgaggcagaatattactgtgttctatggtacagcaaccgctgggtgttcggtggaggaaccaaactgactgtccta

SEQ ID NO: 1694 - protein, 124 aa, Artificial Sequence
  EN00E4-H
QVQLVQSGPEVKKPGASVKLSCKASGYTFTDYVIHWMRQAPGQRLEWMGYINPYDDDTTYNQKFKGRVTITLDTSASTAYMELNSLRSEDTAVYYCARRGNSYDGYFDYSMDYWGQGTLVTVSS

SEQ ID NO: 1695 - protein, 5 aa, Artificial Sequence
  EN00E4-HCDR1
DYVIH

SEQ ID NO: 1696 - protein, 17 aa, Artificial Sequence
  EN00E4-HCDR2
YINPYDDDTTYNQKFKG

SEQ ID NO: 1697 - protein, 15 aa, Artificial Sequence
  EN00E4-HCDR3
RGNSYDGYFDYSMDY

SEQ ID NO: 1698 - DNA, 372 bp, Artificial Sequence
  EN00E4-H
caggtgcagctggtccagtcaggacctgaggtgaagaagcctggggcttcagtgaagttgtcctgcaaggcttctggatacacattcactgactatgttatacactggatgaggcaggcacctggacagcgccttgagtggatgggatatattaatccttatgatgatgatactacctacaaccagaagttcaagggccgggtcacaattactctagacacatccgccagcacagcctacatggaactcaacagcctgagatctgaggacactgcagtctattactgtgcaagaagggggaactcctatgatggttacttcgactattctatggactactggggtcaaggaaccttggtcaccgtctcctca

SEQ ID NO: 1699 - protein, 108 aa, Artificial Sequence
  EN00E4-L
DIQLTQSPKFMSTSVGDKVTITCRASQNVGTAVAWYQQKPGKAPKLLIYSASNRYTGVPSRFSGSGSGTEFTLTISSLQPEDFANYFCQQYTNYPMYTFGQGTKLEIK

SEQ ID NO: 1700 - protein, 11 aa, Artificial Sequence
  EN00E4-LCDR1
RASQNVGTAVA

SEQ ID NO: 1701 - protein, 7 aa, Artificial Sequence
  EN00E4-LCDR2
SASNRYT

SEQ ID NO: 1702 - protein, 10 aa, Artificial Sequence
  EN00E4-LCDR3
QQYTNYPMYT

SEQ ID NO: 1703 - DNA, 324 bp, Artificial Sequence
  EN00E4-L
gacatccagctgacccagtctccaaaattcatgtccacatcagtaggagacaaagtcaccatcacctgcagggccagtcagaatgtgggtactgctgtagcctggtatcaacagaaaccaggaaaagcccctaaattactgatttactcggcatcgaatcggtacactggagtccctagtcgcttctcaggcagtggatctgggacagagttcactctcaccatcagcagtctgcagcctgaagacttcgcaaattatttctgccagcaatataccaactatcccatgtatacgtttggacaggggaccaagctggaaataaaa

SEQ ID NO: 1704 - protein, 247 aa, Artificial Sequence
  EN00E4-HL
QVQLVQSGPEVKKPGASVKLSCKASGYTFTDYVIHWMRQAPGQRLEWMGYINPYDDDTTYNQKFKGRVTITLDTSASTAYMELNSLRSEDTAVYYCARRGNSYDGYFDYSMDYWGQGTLVTVSSGGGGSGGGGSGGGGSDIQLTQSPKFMSTSVGDKVTITCRASQNVGTAVAWYQQKPGKAPKLLIYSASNRYTGVPSRFSGSGSGTEFTLTISSLQPEDFANYFCQQYTNYPMYTFGQGTKLEIK

SEQ ID NO: 1705 - DNA, 741 bp, Artificial Sequence
  EN00E4-HL
caggtgcagctggtccagtcaggacctgaggtgaagaagcctggggcttcagtgaagttgtcctgcaaggcttctggatacacattcactgactatgttatacactggatgaggcaggcacctggacagcgccttgagtggatgggatatattaatccttatgatgatgatactacctacaaccagaagttcaagggccgggtcacaattactctagacacatccgccagcacagcctacatggaactcaacagcctgagatctgaggacactgcagtctattactgtgcaagaagggggaactcctatgatggttacttcgactattctatggactactggggtcaaggaaccttggtcaccgtctcctcaggtggtggtggttctggcggcggcggctccggtggtggtggttctgacatccagctgacccagtctccaaaattcatgtccacatcagtaggagacaaagtcaccatcacctgcagggccagtcagaatgtgggtactgctgtagcctggtatcaacagaaaccaggaaaagcccctaaattactgatttactcggcatcgaatcggtacactggagtccctagtcgcttctcaggcagtggatctgggacagagttcactctcaccatcagcagtctgcagcctgaagacttcgcaaattatttctgccagcaatataccaactatcccatgtatacgtttggacaggggaccaagctggaaataaaa

SEQ ID NO: 1706 - protein, 502 aa, Artificial Sequence
  EN00E4 HL x I2C HL
QVQLVQSGPEVKKPGASVKLSCKASGYTFTDYVIHWMRQAPGQRLEWMGYINPYDDDTTYNQKFKGRVTITLDTSASTAYMELNSLRSEDTAVYYCARRGNSYDGYFDYSMDYWGQGTLVTVSSGGGGSGGGGSGGGGSDIQLTQSPKFMSTSVGDKVTITCRASQNVGTAVAWYQQKPGKAPKLLIYSASNRYTGVPSRFSGSGSGTEFTLTISSLQPEDFANYFCQQYTNYPMYTFGQGTKLEIKSGGGGSEVQLVESGGGLVQPGGSLKLSCAASGFTFNKYAMNWVRQAPGKGLEWVARIRSKYNNYATYYADSVKDRFTISRDDSKNTAYLQMNNLKTEDTAVYYCVRHGNFGNSYISYWAYWGQGTLVTVSSGGGGSGGGGSGGGGSQTVVTQEPSLTVSPGGTVTLTCGSSTGAVTSGNYPNWVQQKPGQAPRGLIGGTKFLAPGTPARFSGSLLGGKAALTLSGVQPEDEAEYYCVLWYSNRWVFGGGTKLTVL

SEQ ID NO: 1707 - DNA, 1506 bp, Artificial Sequence
  EN00E4 HL x I2C HL
caggtgcagctggtccagtcaggacctgaggtgaagaagcctggggcttcagtgaagttgtcctgcaaggcttctggatacacattcactgactatgttatacactggatgaggcaggcacctggacagcgccttgagtggatgggatatattaatccttatgatgatgatactacctacaaccagaagttcaagggccgggtcacaattactctagacacatccgccagcacagcctacatggaactcaacagcctgagatctgaggacactgcagtctattactgtgcaagaagggggaactcctatgatggttacttcgactattctatggactactggggtcaaggaaccttggtcaccgtctcctcaggtggtggtggttctggcggcggcggctccggtggtggtggttctgacatccagctgacccagtctccaaaattcatgtccacatcagtaggagacaaagtcaccatcacctgcagggccagtcagaatgtgggtactgctgtagcctggtatcaacagaaaccaggaaaagcccctaaattactgatttactcggcatcgaatcggtacactggagtccctagtcgcttctcaggcagtggatctgggacagagttcactctcaccatcagcagtctgcagcctgaagacttcgcaaattatttctgccagcaatataccaactatcccatgtatacgtttggacaggggaccaagctggaaataaaatccggaggtggtggatccgaggtgcagctggtcgagtctggaggaggattggtgcagcctggagggtcattgaaactctcatgtgcagcctctggattcaccttcaataagtacgccatgaactgggtccgccaggctccaggaaagggtttggaatgggttgctcgcataagaagtaaatataataattatgcaacatattatgccgattcagtgaaagacaggttcaccatctccagagatgattcaaaaaacactgcctatctacaaatgaacaacttgaaaactgaggacactgccgtgtactactgtgtgagacatgggaacttcggtaatagctacatatcctactgggcttactggggccaagggactctggtcaccgtctcctcaggtggtggtggttctggcggcggcggctccggtggtggtggttctcagactgttgtgactcaggaaccttcactcaccgtatcacctggtggaacagtcacactcacttgtggctcctcgactggggctgttacatctggcaactacccaaactgggtccaacaaaaaccaggtcaggcaccccgtggtctaataggtgggactaagttcctcgcccccggtactcctgccagattctcaggctccctgcttggaggcaaggctgccctcaccctctcaggggtacagccagaggatgaggcagaatattactgtgttctatggtacagcaaccgctgggtgttcggtggaggaaccaaactgactgtccta

SEQ ID NO: 1708 - protein, 124 aa, Artificial Sequence
  En00F7-H
QVQLVQSGPEVKKPGASVKLSCKASGYTFTDYVIHWVKQAPGQRLEWMGYINPYDDDTTYNQKFKGQVTITVDTSASTAYMELNSLRSEDTAVYYCARRGNSYDGYFDYSMDYWGQGTLVTVSS

SEQ ID NO: 1709 - protein, 5 aa, Artificial Sequence
  EN00F7-HCDR1
DYVIH

SEQ ID NO: 1710 - protein, 17 aa, Artificial Sequence
  EN00F7-HCDR2
YINPYDDDTTYNQKFKG

SEQ ID NO: 1711 - protein, 15 aa, Artificial Sequence
  EN00F7-HCDR3
RGNSYDGYFDYSMDY

SEQ ID NO: 1712 - DNA, 372 bp, Artificial Sequence
  EN00F7-H
caggtgcagctggtccagtcaggacctgaggtgaagaagcctggggcttcagtgaagttgtcctgcaaggcttctggatacacattcactgactatgttatacactgggtgaagcaggcacctggacagcgccttgagtggatgggatatattaatccttatgatgatgatactacctacaaccagaagttcaagggccaggtcacaattactgtagacacatccgccagcacagcctacatggaactcaacagcctgagatctgaggacactgcagtctattactgtgcaagaagggggaactcctatgatggttacttcgactattctatggactactggggtcaaggaaccttggtcaccgtctcctca

SEQ ID NO: 1713 - protein, 108 aa, Artificial Sequence
  EN00F7-L
DIQLTQSPSFLSASVGDRVTITCRASQNVGTAVAWYQQKPGKAPKLLIYSASNRYTGVPSRFSGSGSGTEFTLTISSMQPEDLATYFCQQYTNYPMYTFGQGTKLEIK

SEQ ID NO: 1714 - protein, 11 aa, Artificial Sequence
  EN00F7-LCDR1
RASQNVGTAVA

SEQ ID NO: 1715 - protein, 7 aa, Artificial Sequence
  EN00F7-LCDR2
SASNRYT

SEQ ID NO: 1716 - protein, 10 aa, Artificial Sequence
  EN00F7-LCDR3
QQYTNYPMYT

SEQ ID NO: 1717 - DNA, 324 bp, Artificial Sequence
  EN00F7-L
gacatccagctgacccagtctccaagcttcctgtccgcatcagtaggagacagagtcaccatcacctgcagggccagtcagaatgtgggtactgctgtagcctggtatcaacagaaaccaggaaaagcccctaaattactgatttactcggcatcgaatcggtacactggagtccctagtcgcttctcaggcagtggatctgggacagagttcactctcaccatcagcagtatgcagcctgaagacctcgcaacttatttctgccagcaatataccaactatcccatgtatacgtttggacaggggaccaagctggaaataaaa

SEQ ID NO: 1718 - protein, 247 aa, Artificial Sequence
  EN00F7-HL
QVQLVQSGPEVKKPGASVKLSCKASGYTFTDYVIHWVKQAPGQRLEWMGYINPYDDDTTYNQKFKGQVTITVDTSASTAYMELNSLRSEDTAVYYCARRGNSYDGYFDYSMDYWGQGTLVTVSSGGGGSGGGGSGGGGSDIQLTQSPSFLSASVGDRVTITCRASQNVGTAVAWYQQKPGKAPKLLIYSASNRYTGVPSRFSGSGSGTEFTLTISSMQPEDLATYFCQQYTNYPMYTFGQGTKLEIK

SEQ ID NO: 1719 - DNA, 741 bp, Artificial Sequence
  EN00F7-HL
caggtgcagctggtccagtcaggacctgaggtgaagaagcctggggcttcagtgaagttgtcctgcaaggcttctggatacacattcactgactatgttatacactgggtgaagcaggcacctggacagcgccttgagtggatgggatatattaatccttatgatgatgatactacctacaaccagaagttcaagggccaggtcacaattactgtagacacatccgccagcacagcctacatggaactcaacagcctgagatctgaggacactgcagtctattactgtgcaagaagggggaactcctatgatggttacttcgactattctatggactactggggtcaaggaaccttggtcaccgtctcctcaggtggtggtggttctggcggcggcggctccggtggtggtggttctgacatccagctgacccagtctccaagcttcctgtccgcatcagtaggagacagagtcaccatcacctgcagggccagtcagaatgtgggtactgctgtagcctggtatcaacagaaaccaggaaaagcccctaaattactgatttactcggcatcgaatcggtacactggagtccctagtcgcttctcaggcagtggatctgggacagagttcactctcaccatcagcagtatgcagcctgaagacctcgcaacttatttctgccagcaatataccaactatcccatgtatacgtttggacaggggaccaagctggaaataaaa

SEQ ID NO: 1720 - protein, 502 aa, Artificial Sequence
  En00F7 HL x I2C HL
QVQLVQSGPEVKKPGASVKLSCKASGYTFTDYVIHWVKQAPGQRLEWMGYINPYDDDTTYNQKFKGQVTITVDTSASTAYMELNSLRSEDTAVYYCARRGNSYDGYFDYSMDYWGQGTLVTVSSGGGGSGGGGSGGGGSDIQLTQSPSFLSASVGDRVTITCRASQNVGTAVAWYQQKPGKAPKLLIYSASNRYTGVPSRFSGSGSGTEFTLTISSMQPEDLATYFCQQYTNYPMYTFGQGTKLEIKSGGGGSEVQLVESGGGLVQPGGSLKLSCAASGFTFNKYAMNWVRQAPGKGLEWVARIRSKYNNYATYYADSVKDRFTISRDDSKNTAYLQMNNLKTEDTAVYYCVRHGNFGNSYISYWAYWGQGTLVTVSSGGGGSGGGGSGGGGSQTVVTQEPSLTVSPGGTVTLTCGSSTGAVTSGNYPNWVQQKPGQAPRGLIGGTKFLAPGTPARFSGSLLGGKAALTLSGVQPEDEAEYYCVLWYSNRWVFGGGTKLTVL

SEQ ID NO: 1721 - DNA, 1506 bp, Artificial Sequence
  En00F7 HL x I2C HL
caggtgcagctggtccagtcaggacctgaggtgaagaagcctggggcttcagtgaagttgtcctgcaaggcttctggatacacattcactgactatgttatacactgggtgaagcaggcacctggacagcgccttgagtggatgggatatattaatccttatgatgatgatactacctacaaccagaagttcaagggccaggtcacaattactgtagacacatccgccagcacagcctacatggaactcaacagcctgagatctgaggacactgcagtctattactgtgcaagaagggggaactcctatgatggttacttcgactattctatggactactggggtcaaggaaccttggtcaccgtctcctcaggtggtggtggttctggcggcggcggctccggtggtggtggttctgacatccagctgacccagtctccaagcttcctgtccgcatcagtaggagacagagtcaccatcacctgcagggccagtcagaatgtgggtactgctgtagcctggtatcaacagaaaccaggaaaagcccctaaattactgatttactcggcatcgaatcggtacactggagtccctagtcgcttctcaggcagtggatctgggacagagttcactctcaccatcagcagtatgcagcctgaagacctcgcaacttatttctgccagcaatataccaactatcccatgtatacgtttggacaggggaccaagctggaaataaaatccggaggtggtggatccgaggtgcagctggtcgagtctggaggaggattggtgcagcctggagggtcattgaaactctcatgtgcagcctctggattcaccttcaataagtacgccatgaactgggtccgccaggctccaggaaagggtttggaatgggttgctcgcataagaagtaaatataataattatgcaacatattatgccgattcagtgaaagacaggttcaccatctccagagatgattcaaaaaacactgcctatctacaaatgaacaacttgaaaactgaggacactgccgtgtactactgtgtgagacatgggaacttcggtaatagctacatatcctactgggcttactggggccaagggactctggtcaccgtctcctcaggtggtggtggttctggcggcggcggctccggtggtggtggttctcagactgttgtgactcaggaaccttcactcaccgtatcacctggtggaacagtcacactcacttgtggctcctcgactggggctgttacatctggcaactacccaaactgggtccaacaaaaaccaggtcaggcaccccgtggtctaataggtgggactaagttcctcgcccccggtactcctgccagattctcaggctccctgcttggaggcaaggctgccctcaccctctcaggggtacagccagaggatgaggcagaatattactgtgttctatggtacagcaaccgctgggtgttcggtggaggaaccaaactgactgtccta

SEQ ID NO: 1722 - protein, 124 aa, Artificial Sequence
  EN00H6-H
QVQLVQSGAEVKKPGASVKLSCKASGYTFTDYVIHWVRQTPGQRLEWMGYINPYDDDTTYNQKFKGRVTITGDTSANTAYMELNSLTSEDTAVYYCARRGNSYDGYFDYSMDYWGQGTLVTVSS

SEQ ID NO: 1723 - protein, 5 aa, Artificial Sequence
  EN00H6-HCDR1
DYVIH

SEQ ID NO: 1724 - protein, 17 aa, Artificial Sequence
  EN00H6-HCDR2
YINPYDDDTTYNQKFKG

SEQ ID NO: 1725 - protein, 15 aa, Artificial Sequence
  EN00H6-HCDR3
RGNSYDGYFDYSMDY

SEQ ID NO: 1726 - DNA, 372 bp, Artificial Sequence
  EN00H6-H
caggtgcagctggtccagtcaggagctgaggtgaagaagcctggggcttcagtgaagttgtcctgcaaggcttctggatacacattcactgactatgttatacactgggtgaggcagacacctggacagcgtcttgagtggatgggatatattaatccttatgatgatgatactacctacaaccagaagttcaagggccgggtcacaattactggagacacatccgccaacacagcctacatggaactcaacagcctgacatctgaggacactgcagtctattactgtgcaagaagggggaactcctatgatggttacttcgactattctatggactactggggtcaaggaaccttggtcaccgtctcctca

SEQ ID NO: 1727 - protein, 108 aa, Artificial Sequence
  EN00H6-L
DIQLTQSPSFLSASVGDRVTITCRASQNVGTAVAWYQQKPGKAPKLLIYSASNRYTGVPSRFSGSGSGTEFTLTISSLQSEDLATYYCQQYTNYPMYTFGQGTKLEIK

SEQ ID NO: 1728 - protein, 11 aa, Artificial Sequence
  EN00H6-LCDR1
RASQNVGTAVA

SEQ ID NO: 1729 - protein, 7 aa, Artificial Sequence
  EN00H6-LCDR2
SASNRYT

SEQ ID NO: 1730 - protein, 10 aa, Artificial Sequence
  EN00H6-LCDR3
QQYTNYPMYT

SEQ ID NO: 1731 - DNA, 324 bp, Artificial Sequence
  EN00H6-L
gacatccagctgacccagtctccaagcttcctgtccgcatcagtaggagacagagtcaccatcacctgcagggccagtcagaatgtgggtactgctgtagcctggtatcaacagaaaccaggaaaagcccctaaattactgatttactcggcatcgaatcggtacactggagtccctagtcgcttctcaggcagtggatctgggacagagttcactctcaccatcagcagtctgcagtctgaagacctcgcaacttattactgccagcaatataccaactatcccatgtatacgtttggacaggggaccaagctggaaataaaa

SEQ ID NO: 1732 - protein, 247 aa, Artificial Sequence
  EN00H6-HL
QVQLVQSGAEVKKPGASVKLSCKASGYTFTDYVIHWVRQTPGQRLEWMGYINPYDDDTTYNQKFKGRVTITGDTSANTAYMELNSLTSEDTAVYYCARRGNSYDGYFDYSMDYWGQGTLVTVSSGGGGSGGGGSGGGGSDIQLTQSPSFLSASVGDRVTITCRASQNVGTAVAWYQQKPGKAPKLLIYSASNRYTGVPSRFSGSGSGTEFTLTISSLQSEDLATYYCQQYTNYPMYTFGQGTKLEIK

SEQ ID NO: 1733 - DNA, 741 bp, Artificial Sequence
  EN00H6-HL
caggtgcagctggtccagtcaggagctgaggtgaagaagcctggggcttcagtgaagttgtcctgcaaggcttctggatacacattcactgactatgttatacactgggtgaggcagacacctggacagcgtcttgagtggatgggatatattaatccttatgatgatgatactacctacaaccagaagttcaagggccgggtcacaattactggagacacatccgccaacacagcctacatggaactcaacagcctgacatctgaggacactgcagtctattactgtgcaagaagggggaactcctatgatggttacttcgactattctatggactactggggtcaaggaaccttggtcaccgtctcctcaggtggtggtggttctggcggcggcggctccggtggtggtggttctgacatccagctgacccagtctccaagcttcctgtccgcatcagtaggagacagagtcaccatcacctgcagggccagtcagaatgtgggtactgctgtagcctggtatcaacagaaaccaggaaaagcccctaaattactgatttactcggcatcgaatcggtacactggagtccctagtcgcttctcaggcagtggatctgggacagagttcactctcaccatcagcagtctgcagtctgaagacctcgcaacttattactgccagcaatataccaactatcccatgtatacgtttggacaggggaccaagctggaaataaaa

SEQ ID NO: 1734 - protein, 502 aa, Artificial Sequence
  EN00H6 HL x I2C HL
QVQLVQSGAEVKKPGASVKLSCKASGYTFTDYVIHWVRQTPGQRLEWMGYINPYDDDTTYNQKFKGRVTITGDTSANTAYMELNSLTSEDTAVYYCARRGNSYDGYFDYSMDYWGQGTLVTVSSGGGGSGGGGSGGGGSDIQLTQSPSFLSASVGDRVTITCRASQNVGTAVAWYQQKPGKAPKLLIYSASNRYTGVPSRFSGSGSGTEFTLTISSLQSEDLATYYCQQYTNYPMYTFGQGTKLEIKSGGGGSEVQLVESGGGLVQPGGSLKLSCAASGFTFNKYAMNWVRQAPGKGLEWVARIRSKYNNYATYYADSVKDRFTISRDDSKNTAYLQMNNLKTEDTAVYYCVRHGNFGNSYISYWAYWGQGTLVTVSSGGGGSGGGGSGGGGSQTVVTQEPSLTVSPGGTVTLTCGSSTGAVTSGNYPNWVQQKPGQAPRGLIGGTKFLAPGTPARFSGSLLGGKAALTLSGVQPEDEAEYYCVLWYSNRWVFGGGTKLTVL

SEQ ID NO: 1735 - DNA, 1506 bp, Artificial Sequence
  EN00H6 HL x I2C HL
caggtgcagctggtccagtcaggagctgaggtgaagaagcctggggcttcagtgaagttgtcctgcaaggcttctggatacacattcactgactatgttatacactgggtgaggcagacacctggacagcgtcttgagtggatgggatatattaatccttatgatgatgatactacctacaaccagaagttcaagggccgggtcacaattactggagacacatccgccaacacagcctacatggaactcaacagcctgacatctgaggacactgcagtctattactgtgcaagaagggggaactcctatgatggttacttcgactattctatggactactggggtcaaggaaccttggtcaccgtctcctcaggtggtggtggttctggcggcggcggctccggtggtggtggttctgacatccagctgacccagtctccaagcttcctgtccgcatcagtaggagacagagtcaccatcacctgcagggccagtcagaatgtgggtactgctgtagcctggtatcaacagaaaccaggaaaagcccctaaattactgatttactcggcatcgaatcggtacactggagtccctagtcgcttctcaggcagtggatctgggacagagttcactctcaccatcagcagtctgcagtctgaagacctcgcaacttattactgccagcaatataccaactatcccatgtatacgtttggacaggggaccaagctggaaataaaatccggaggtggtggatccgaggtgcagctggtcgagtctggaggaggattggtgcagcctggagggtcattgaaactctcatgtgcagcctctggattcaccttcaataagtacgccatgaactgggtccgccaggctccaggaaagggtttggaatgggttgctcgcataagaagtaaatataataattatgcaacatattatgccgattcagtgaaagacaggttcaccatctccagagatgattcaaaaaacactgcctatctacaaatgaacaacttgaaaactgaggacactgccgtgtactactgtgtgagacatgggaacttcggtaatagctacatatcctactgggcttactggggccaagggactctggtcaccgtctcctcaggtggtggtggttctggcggcggcggctccggtggtggtggttctcagactgttgtgactcaggaaccttcactcaccgtatcacctggtggaacagtcacactcacttgtggctcctcgactggggctgttacatctggcaactacccaaactgggtccaacaaaaaccaggtcaggcaccccgtggtctaataggtgggactaagttcctcgcccccggtactcctgccagattctcaggctccctgcttggaggcaaggctgccctcaccctctcaggggtacagccagaggatgaggcagaatattactgtgttctatggtacagcaaccgctgggtgttcggtggaggaaccaaactgactgtccta

SEQ ID NO: 1736 - protein, 119 aa, Artificial Sequence; identical to SEQ ID NO: 1015
  hEp14G6-H

SEQ ID NO: 1737 - protein, 5 aa, Artificial Sequence
  hEp14G6-HCDR1
NYWLG

SEQ ID NO: 1738 - protein, 17 aa, Artificial Sequence
  hEp14G6-HCDR2
DIFPGSGNIHYNEKFKG

SEQ ID NO: 1739 - protein, 10 aa, Artificial Sequence
  hEp14G6-HCDR3
LRNWDEPMDY

SEQ ID NO: 1740 - DNA, 357 bp, Artificial Sequence; identical to SEQ ID NO: 1019
  hEp14G6-H

SEQ ID NO: 1741 - protein, 113 aa, Artificial Sequence; identical to SEQ ID NO: 1010
  hEp14G6-L

SEQ ID NO: 1742 - protein, 17 aa, Artificial Sequence
  HEP14G6-LCDR1
KSSQSLLNSGNQKNYLT

SEQ ID NO: 1743 - protein, 7 aa, Artificial Sequence
  HEP14G6-LCDR2
WASTRES

SEQ ID NO: 1744 - protein, 9 aa, Artificial Sequence
  HEP14G6-LCDR3
QNDYSYPLT

SEQ ID NO: 1745 - DNA, 339 bp, Artificial Sequence; identical to SEQ ID NO: 1014
  HEP14G6-L

SEQ ID NO: 1746 - protein, 247 aa, Artificial Sequence
  HEP14G6-LH
DIVMTQTPLSLTVTPGEPVSISCKSSQSLLNSGNQKNYLTWYLQKPGQPPQLLIYWASTRESGVPDRFSGSGSGTDFTLKISRVQAEDVGVYYCQNDYSYPLTFGQGTKLEIKGGGGSGGGGSGGGGSQVQLVQSGAEVKKPGSSVKVSCKASGYTFSNYWLGWVRQAPGQGLEWMGDIFPGSGNIHYNEKFKGRATITADKSTSTAYMELSSLTSEDTAVYYCARLRNWDEPMDYWGQGTTVTVSS

SEQ ID NO: 1747 - DNA, 741 bp, Artificial Sequence
  HEP14G6-LH
gacatcgtgatgacacagactccactctccctgactgtgacaccaggagagccggtctctatcagctgcaagtccagtcagagtctgttaaacagtggaaatcaaaagaactacttgacctggtacctgcagaaaccagggcagcctcctcaactgttgatctactgggcatccactagggaatctggggtccctgatcgcttctcaggcagtggatctggaacagatttcactctcaaaatcagccgtgtgcaggctgaagacgtgggagtttattactgtcagaatgattatagttatccgctcacgttcggtcaagggaccaagcttgagatcaaaggtggtggtggttctggcggcggcggctccggtggtggtggttctcaggtgcagctggtccagtctggagctgaggtgaaaaagcctgggtcttcagtgaaggtatcctgcaaggcttctggatacaccttctctaactactggctaggttgggtaaggcaggcgcctggacagggacttgagtggatgggagatattttccctggaagtggtaatatccactacaatgagaagttcaagggcagagccacaatcactgcagacaaatctacgagcacagcctatatggaactcagtagcctgacatctgaggacactgctgtctattactgtgcaagactgaggaactgggacgagcctatggactactggggccaagggaccacggtcaccgtctcctcc

SEQ ID NO: 1748 - protein, 501 aa, Artificial Sequence; identical to SEQ ID NO: 1020
  hEp14G6 LH x I2C HL

SEQ ID NO: 1749 - DNA, 1503 bp, Artificial Sequence; identical to SEQ ID NO: 1021
  hEp14G6 LH x I2C HL

SEQ ID NO: 1750 - protein, 119 aa, Artificial Sequence; identical to SEQ ID NO: 967
  HEP14D2-H

SEQ ID NO: 1751 - protein, 5 aa, Artificial Sequence
  HEP14D2-HCDR1
NYWLG

SEQ ID NO: 1752 - protein, 17 aa, Artificial Sequence
  HEP14D2-HCDR2
DIFPGSGNIHYNEKFKG

SEQ ID NO: 1753 - protein, 10 aa, Artificial Sequence
  HEP14D2-HCDR3
LRNWDEPMDY

SEQ ID NO: 1754 - DNA, 357 bp, Artificial Sequence; identical to SEQ ID NO: 971
  HEP14D2-H

SEQ ID NO: 1755 - protein, 113 aa, Artificial Sequence; identical to SEQ ID NO: 962
  HEP14D2-L

SEQ ID NO: 1756 - protein, 17 aa, Artificial Sequence
  HEP14D2-LCDR1
KSSQSLLNSGNQKNYLT

SEQ ID NO: 1757 - protein, 7 aa, Artificial Sequence
  HEP14D2-LCDR2
WASTRES

SEQ ID NO: 1758 - protein, 9 aa, Artificial Sequence
  HEP14D2-LCDR3
QNDYSYPLT

SEQ ID NO: 1759 - DNA, 339 bp, Artificial Sequence; identical to SEQ ID NO: 966
  HEP14D2-L

SEQ ID NO: 1760 - protein, 247 aa, Artificial Sequence
  HEP14D2-LH
DIVMTQTPLSLPVTPGEQVSISCKSSQSLLNSGNQKNYLTWYQQKPGQSPQLLIYWASTRESGVPDRFSGSGSGTDFTLKISRVEAEDVGVYYCQNDYSYPLTFGQGTKLEIKGGGGSGGGGSGGGGSQVQLVQSGAEVKKPGSSVKVSCKASGYTFSNYWLGWVRQAPGQGLEWMGDIFPGSGNIHYNEKFKGRVTITADKSTSTAYMELSSLTSEDTAVYYCARLRNWDEPMDYWGQGTTVTVSS

SEQ ID NO: 1761 - DNA, 741 bp, Artificial Sequence
  HEP14D2-LH
gacatcgtgatgacacagactccactctccctgcctgtgacaccaggagagcaggtctctatcagctgcaagtccagtcagagtctgttaaacagtggaaatcaaaagaactacttgacctggtaccagcagaaaccagggcagtctcctcaactgttgatctactgggcatccactagggaatctggggtccctgatcgcttctcaggcagtggatctggaacagatttcactctcaaaatcagccgtgtggaggctgaagacgtgggagtttattactgtcagaatgattatagttatccgctcacgttcggtcaagggaccaagcttgagatcaaaggtggtggtggttctggcggcggcggctccggtggtggtggttctcaggtgcagctggtccagtctggagctgaggtgaaaaagcctgggtcttcagtgaaggtatcctgcaaggcttctggatacaccttctctaactactggctaggttgggtaaggcaggcgcctggacagggacttgagtggatgggagatattttccctggaagtggtaatatccactacaatgagaagttcaagggcagagtcacaatcactgcagacaaatctacgagcacagcctatatggaactcagtagcctgacatctgaggacactgctgtctattactgtgcaagactgaggaactgggacgagcctatggactactggggccaagggaccacggtcaccgtctcctcc

SEQ ID NO: 1762 - protein, 501 aa, Artificial Sequence; identical to SEQ ID NO: 972
  hEp14D2 LH x I2C HL

SEQ ID NO: 1763 - DNA, 1503 bp, Artificial Sequence; identical to SEQ ID NO: 973
  hEp14D2 LH x I2C HL

SEQ ID NO: 1764 - protein, 119 aa, Artificial Sequence; identical to SEQ ID NO: 1063
  HEP18A6-H

SEQ ID NO: 1765 - protein, 5 aa, Artificial Sequence
  HEP18A6-HCDR1
NYWLG

SEQ ID NO: 1766 - protein, 17 aa, Artificial Sequence
  HEP18A6-HCDR2
DIFPGSGNIHYNEKFKG

SEQ ID NO: 1767 - protein, 10 aa, Artificial Sequence
  HEP18A6-HCDR3
LRNWDEPMDY

SEQ ID NO: 1768 - DNA, 357 bp, Artificial Sequence; identical to SEQ ID NO: 1067
  HEP18A6-H

SEQ ID NO: 1769 - protein, 113 aa, Artificial Sequence; identical to SEQ ID NO: 1058
  HEP18A6-L

SEQ ID NO: 1770 - protein, 17 aa, Artificial Sequence
  HEP18A6-LCDR1
KSSQSLLNSGNQKNYLT

SEQ ID NO: 1771 - protein, 7 aa, Artificial Sequence
  HEP18A6-LCDR2
WASTRES

SEQ ID NO: 1772 - protein, 9 aa, Artificial Sequence
  HEP18A6-LCDR3
QNDYSYPLT

SEQ ID NO: 1773 - DNA, 339 bp, Artificial Sequence; identical to SEQ ID NO: 1062
  HEP18A6-L

SEQ ID NO: 1774 - protein, 247 aa, Artificial Sequence
  HEP18A6-LH
DIVMTQTPLSLPVTPGEQVSMSCKSSQSLLNSGNQKNYLTWYLQKPGQSPQLLIYWASTRESGVPDRFSGSGSGTDFTLNISSVEAEDVGVYYCQNDYSYPLTFGQGTKLEIKGGGGSGGGGSGGGGSQVQLVQSGAEVKKPGSSVKVSCKASGYTFSNYWLGWVRQTPGQGLEWMGDIFPGSGNIHYNEKFKGRVTITADKSTSTAYMELSSLTSEDTAVYYCARLRNWDEPMDYWGQGTTVTVSS

SEQ ID NO: 1775 - DNA, 741 bp, Artificial Sequence
  HEP18A6-LH
gacatcgtgatgacacagactccactctccctgcctgtgacaccaggagagcaggtctctatgagctgcaagtccagtcagagtctgttaaacagtggaaatcaaaagaactacttgacctggtacctgcagaaaccagggcagtctcctcaactgttgatctactgggcatccactagggaatctggggtccctgatcgcttctcaggcagtggatctggaacagatttcactctcaacatcagcagtgtggaggctgaagacgtgggagtttattactgtcagaatgattatagttatccgctcacgttcggtcaagggaccaagcttgagatcaaaggtggtggtggttctggcggcggcggctccggtggtggtggttctcaggtgcagctggtccagtctggagctgaggtgaaaaagcctgggtcttcagtgaaggtatcctgcaaggcttctggatacaccttctctaactactggctaggttgggtaaggcagacgcctggacagggacttgagtggatgggagatattttccctggaagtggtaatatccactacaatgagaagttcaagggcagagtcacaatcactgcagacaaatctacgagcacagcctatatggaactcagtagcctgacatctgaggacactgctgtctattactgtgcaagactgaggaactgggacgagcctatggactactggggccaagggaccacggtcaccgtctcctcc

SEQ ID NO: 1776 - protein, 501 aa, Artificial Sequence
  hEp18A6 LH x I2C HL
DIVMTQTPLSLPVTPGEQVSMSCKSSQSLLNSGNQKNYLTWYLQKPGQSPQLLIYWASTRESGVPDRFSGSGSGTDFTLNISSVEAEDVGVYYCQNDYSYPLTFGQGTKLEIKGGGGSGGGGSGGGGSQVQLVQSGAEVKKPGSSVKVSCKASGYTFSNYWLGWVRQTPGQGLEWMGDIFPGSGNIHYNEKFKGRVTITADKSTSTAYMELSSLTSEDTAVYYCARLRNWDEPMDYWGQGTTVTVSSGGGGSEVQLVESGGGLVQPGGSLKLSCAASGFTFNKYAMNWVRQAPGKGLEWVARIRSKYNNYATYYADSVKDRFTISRDDSKNTAYLQMNNLKTEDTAVYYCVRHGNFGNSYISYWAYWGQGTLVTVSSGGGGSGGGGSGGGGSQTVVTQEPSLTVSPGGTVTLTCGSSTGAVTSGNYPNWVQQKPGQAPRGLIGGTKFLAPGTPARFSGSLLGGKAALTLSGVQPEDEAEYYCVLWYSNRWVFGGGTKLTVL

SEQ ID NO: 1777 - DNA, 1503 bp, Artificial Sequence
  hEp18A6 LH x I2C HL
gacatcgtgatgacacagactccactctccctgcctgtgacaccaggagagcaggtctctatgagctgcaagtccagtcagagtctgttaaacagtggaaatcaaaagaactacttgacctggtacctgcagaaaccagggcagtctcctcaactgttgatctactgggcatccactagggaatctggggtccctgatcgcttctcaggcagtggatctggaacagatttcactctcaacatcagcagtgtggaggctgaagacgtgggagtttattactgtcagaatgattatagttatccgctcacgttcggtcaagggaccaagcttgagatcaaaggtggtggtggttctggcggcggcggctccggtggtggtggttctcaggtgcagctggtccagtctggagctgaggtgaaaaagcctgggtcttcagtgaaggtatcctgcaaggcttctggatacaccttctctaactactggctaggttgggtaaggcagacgcctggacagggacttgagtggatgggagatattttccctggaagtggtaatatccactacaatgagaagttcaagggcagagtcacaatcactgcagacaaatctacgagcacagcctatatggaactcagtagcctgacatctgaggacactgctgtctattactgtgcaagactgaggaactgggacgagcctatggactactggggccaagggaccacggtcaccgtctcctccggaggtggtggatccgaggtgcagctggtcgagtctggaggaggattggtgcagcctggagggtcattgaaactctcatgtgcagcctctggattcaccttcaataagtacgccatgaactgggtccgccaggctccaggaaagggtttggaatgggttgctcgcataagaagtaaatataataattatgcaacatattatgccgattcagtgaaagacaggttcaccatctccagagatgattcaaaaaacactgcctatctacaaatgaacaacttgaaaactgaggacactgccgtgtactactgtgtgagacatgggaacttcggtaatagctacatatcctactgggcttactggggccaagggactctggtcaccgtctcctcaggtggtggtggttctggcggcggcggctccggtggtggtggttctcagactgttgtgactcaggaaccttcactcaccgtatcacctggtggaacagtcacactcacttgtggctcctcgactggggctgttacatctggcaactacccaaactgggtccaacaaaaaccaggtcaggcaccccgtggtctaataggtgggactaagttcctcgcccccggtactcctgccagattctcaggctccctgcttggaggcaaggctgccctcaccctctcaggggtacagccagaggatgaggcagaatattactgtgttctatggtacagcaaccgctgggtgttcggtggaggaaccaaactgactgtccta

SEQ ID NO: 1778 - protein, 124 aa, Artificial Sequence
  FA22A9-H
QVQLVQSGAEVKKPGASVKVSCKTSGYTFTEYTIHWVRQAPGQRLEWMGGINPNNGIPNYNQKFKGRVTITIDTSSSTAYMELSSLRSEDTAVYYCARRRIAYGYDEGHAMDYWGQGTLVTVSS

SEQ ID NO: 1779 - protein, 5 aa, Artificial Sequence
  FA22A9-HCDR1
EYTIH

SEQ ID NO: 1780 - protein, 17 aa, Artificial Sequence
  FA22A9-HCDR2
GINPNNGIPNYNQKFKG

SEQ ID NO: 1781 - protein, 15 aa, Artificial Sequence
  FA22A9-HCDR3
RRIAYGYDEGHAMDY

SEQ ID NO: 1782 - DNA, 372 bp, Artificial Sequence
  FA22A9-H
caggtgcagctggtccagtctggagctgaggtgaagaagcctggggcttcagtaaaggtgtcctgcaagacttctggatacacattcactgaatacaccatacactgggtgagacaggcccctggacagagacttgagtggatgggaggtattaatcctaacaatggtattcctaactacaatcagaagttcaagggcagggtcacaataactatagacacgtcctccagcaccgcctacatggagctcagcagcctgagatctgaggatactgcggtctattactgtgcaagaagaagaatcgcctatggttacgacgagggccatgctatggactactggggtcaaggaaccctggtcaccgtctcctca

SEQ ID NO: 1783 - protein, 113 aa, Artificial Sequence
  FA22A9-L
DIVMTQTPLSLAVTVGETASMSCKSSQSLLYSRNQKNYLAWYLQKPGQSPQLLIYWASTRESGVPDRFSGSGSGTDFTLTISRVEAEDVGVYYCQQYFSYPLTFGGGTKVEIK

SEQ ID NO: 1784 - protein, 17 aa, Artificial Sequence
  FA22A9-LCDR1
KSSQSLLYSRNQKNYLA

SEQ ID NO: 1785 - protein, 7 aa, Artificial Sequence
  FA22A9-LCDR2
WASTRES

SEQ ID NO: 1786 - protein, 9 aa, Artificial Sequence
  FA22A9-LCDR3
QQYFSYPLT

SEQ ID NO: 1787 - DNA, 339 bp, Artificial Sequence
  FA22A9-L
gacatcgtgatgacacagactccactctccctagctgtgacagttggagagacggcttctatgagctgcaagtccagtcagagccttttatatagtcgtaatcaaaagaactacttggcctggtacctgcagaagccagggcagtctcctcaactgctgatttactgggcatccactagggaatctggggtccctgatcgcttctcaggcagtggatctgggacggatttcactctcacgatcagcagagtggaggctgaggacgtgggagtttattactgtcagcaatattttagctatccgctcacgttcggtggtgggaccaaggtggagatcaaa

SEQ ID NO: 1788 - protein, 252 aa, Artificial Sequence
  FA22A9-HL
QVQLVQSGAEVKKPGASVKVSCKTSGYTFTEYTIHWVRQAPGQRLEWMGGINPNNGIPNYNQKFKGRVTITIDTSSSTAYMELSSLRSEDTAVYYCARRRIAYGYDEGHAMDYWGQGTLVTVSSGGGGSGGGGSGGGGSDIVMTQTPLSLAVTVGETASMSCKSSQSLLYSRNQKNYLAWYLQKPGQSPQLLIYWASTRESGVPDRFSGSGSGTDFTLTISRVEAEDVGVYYCQQYFSYPLTFGGGTKVEIK

SEQ ID NO: 1789 - DNA, 756 bp, Artificial Sequence
  FA22A9-HL
caggtgcagctggtccagtctggagctgaggtgaagaagcctggggcttcagtaaaggtgtcctgcaagacttctggatacacattcactgaatacaccatacactgggtgagacaggcccctggacagagacttgagtggatgggaggtattaatcctaacaatggtattcctaactacaatcagaagttcaagggcagggtcacaataactatagacacgtcctccagcaccgcctacatggagctcagcagcctgagatctgaggatactgcggtctattactgtgcaagaagaagaatcgcctatggttacgacgagggccatgctatggactactggggtcaaggaaccctggtcaccgtctcctcaggtggtggtggttctggcggcggcggctccggtggtggtggttctgacatcgtgatgacacagactccactctccctagctgtgacagttggagagacggcttctatgagctgcaagtccagtcagagccttttatatagtcgtaatcaaaagaactacttggcctggtacctgcagaagccagggcagtctcctcaactgctgatttactgggcatccactagggaatctggggtccctgatcgcttctcaggcagtggatctgggacggatttcactctcacgatcagcagagtggaggctgaggacgtgggagtttattactgtcagcaatattttagctatccgctcacgttcggtggtgggaccaaggtggagatcaaa

SEQ ID NO: 1790 - protein, 507 aa, Artificial Sequence
  FA22A9 HL x I2C HL
QVQLVQSGAEVKKPGASVKVSCKTSGYTFTEYTIHWVRQAPGQRLEWMGGINPNNGIPNYNQKFKGRVTITIDTSSSTAYMELSSLRSEDTAVYYCARRRIAYGYDEGHAMDYWGQGTLVTVSSGGGGSGGGGSGGGGSDIVMTQTPLSLAVTVGETASMSCKSSQSLLYSRNQKNYLAWYLQKPGQSPQLLIYWASTRESGVPDRFSGSGSGTDFTLTISRVEAEDVGVYYCQQYFSYPLTFGGGTKVEIKSGGGGSEVQLVESGGGLVQPGGSLKLSCAASGFTFNKYAMNWVRQAPGKGLEWVARIRSKYNNYATYYADSVKDRFTISRDDSKNTAYLQMNNLKTEDTAVYYCVRHGNFGNSYISYWAYWGQGTLVTVSSGGGGSGGGGSGGGGSQTVVTQEPSLTVSPGGTVTLTCGSSTGAVTSGNYPNWVQQKPGQAPRGLIGGTKFLAPGTPARFSGSLLGGKAALTLSGVQPEDEAEYYCVLWYSNRWVFGGGTKLTVL

SEQ ID NO: 1791 - DNA, 1521 bp, Artificial Sequence
  FA22A9 HL x I2C HL
caggtgcagctggtccagtctggagctgaggtgaagaagcctggggcttcagtaaaggtgtcctgcaagacttctggatacacattcactgaatacaccatacactgggtgagacaggcccctggacagagacttgagtggatgggaggtattaatcctaacaatggtattcctaactacaatcagaagttcaagggcagggtcacaataactatagacacgtcctccagcaccgcctacatggagctcagcagcctgagatctgaggatactgcggtctattactgtgcaagaagaagaatcgcctatggttacgacgagggccatgctatggactactggggtcaaggaaccctggtcaccgtctcctcaggtggtggtggttctggcggcggcggctccggtggtggtggttctgacatcgtgatgacacagactccactctccctagctgtgacagttggagagacggcttctatgagctgcaagtccagtcagagccttttatatagtcgtaatcaaaagaactacttggcctggtacctgcagaagccagggcagtctcctcaactgctgatttactgggcatccactagggaatctggggtccctgatcgcttctcaggcagtggatctgggacggatttcactctcacgatcagcagagtggaggctgaggacgtgggagtttattactgtcagcaatattttagctatccgctcacgttcggtggtgggaccaaggtggagatcaaatccggaggtggtggatccgaggtgcagctggtcgagtctggaggaggattggtgcagcctggagggtcattgaaactctcatgtgcagcctctggattcaccttcaataagtacgccatgaactgggtccgccaggctccaggaaagggtttggaatgggttgctcgcataagaagtaaatataataattatgcaacatattatgccgattcagtgaaagacaggttcaccatctccagagatgattcaaaaaacactgcctatctacaaatgaacaacttgaaaactgaggacactgccgtgtactactgtgtgagacatgggaacttcggtaatagctacatatcctactgggcttactggggccaagggactctggtcaccgtctcctcaggtggtggtggttctggcggcggcggctccggtggtggtggttctcagactgttgtgactcaggaaccttcactcaccgtatcacctggtggaacagtcacactcacttgtggctcctcgactggggctgttacatctggcaactacccaaactgggtccaacaaaaaccaggtcaggcaccccgtggtctaataggtgggactaagttcctcgcccccggtactcctgccagattctcaggctccctgcttggaggcaaggctgccctcaccctctcaggggtacagccagaggatgaggcagaatattactgtgttctatggtacagcaaccgctgggtgttcggtggaggaaccaaactgactgtccta

SEQ ID NO: 1792 - protein, 124 aa, Artificial Sequence
  FA22C11-H
QVQLVQSGAEVKKPGASVKVSCKTSGYTFTEYTIHWVRQSPGQRLEWMGGINPNNGIPNYNQKFKGRVTITRDKSSSTAYMELSSLRSEDTAVYYCARRRIAYGYDEGHAMDYWGQGTLVTVSS

SEQ ID NO: 1793 - protein, 5 aa, Artificial Sequence
  FA22C11-HCDR1
EYTIH

SEQ ID NO: 1794 - protein, 17 aa, Artificial Sequence
  FA22C11-HCDR2
GINPNNGIPNYNQKFKG

SEQ ID NO: 1795 - protein, 15 aa, Artificial Sequence
  FA22C11-HCDR3
RRIAYGYDEGHAMDY

SEQ ID NO: 1796 - DNA, 372 bp, Artificial Sequence
  FA22C11-H
caggtgcagctggtccagtctggagctgaggtgaagaagcctggggcttcagtaaaggtgtcctgcaagacttctggatacacattcactgaatacaccatacactgggtgagacagtcccctggacagagacttgagtggatgggaggtattaatcctaacaatggtattcctaactacaatcagaagttcaagggcagggtcacaataactagagacaagtcctccagcaccgcctacatggagctcagcagcctgagatctgaggatactgcggtctattactgtgcaagaagaagaatcgcctatggttacgacgagggccatgctatggactactggggtcaaggaaccctggtcaccgtctcctca

SEQ ID NO: 1797 - protein, 113 aa, Artificial Sequence
  FA22C11-L
DIVMTQTPLSLPVTVGEPASISCKSSQSLLYSRNQKNYLAWYLQKPGQSPQLLIYWASTRESGVPDRFSGSGSGTDFTLKISRVEAEDVGIYYCQQYFSYPLTFGGGTKVEIK

SEQ ID NO: 1798 - protein, 17 aa, Artificial Sequence
  FA22C11-LCDR1
KSSQSLLYSRNQKNYLA

SEQ ID NO: 1799 - protein, 7 aa, Artificial Sequence
  FA22C11-LCDR2
WASTRES

SEQ ID NO: 1800 - protein, 9 aa, Artificial Sequence
  FA22C11-LCDR3
QQYFSYPLT

SEQ ID NO: 1801 - DNA, 339 bp, Artificial Sequence
  FA22C11-L
gacatcgtgatgacacagactccactctccctacctgtgacagttggagagccggcttctatcagctgcaagtccagtcagagccttttatatagtcgtaatcaaaagaactacttggcctggtacctgcagaagccagggcagtctcctcaactgctgatttactgggcatccactagggaatctggggtccctgatcgcttctcaggcagtggatctgggacagacttcaccctcaagatctctcgtgtggaggcggaggatgttggaatctattactgtcagcaatattttagctatccgctcacgttcggtggtgggaccaaggtggagatcaaa

SEQ ID NO: 1802 - protein, 252 aa, Artificial Sequence
  FA22C11-HL
QVQLVQSGAEVKKPGASVKVSCKTSGYTFTEYTIHWVRQSPGQRLEWMGGINPNNGIPNYNQKFKGRVTITRDKSSSTAYMELSSLRSEDTAVYYCARRRIAYGYDEGHAMDYWGQGTLVTVSSGGGGSGGGGSGGGGSDIVMTQTPLSLPVTVGEPASISCKSSQSLLYSRNQKNYLAWYLQKPGQSPQLLIYWASTRESGVPDRFSGSGSGTDFTLKISRVEAEDVGIYYCQQYFSYPLTFGGGTKVEIK

SEQ ID NO: 1803 - DNA, 756 bp, Artificial Sequence
  FA22C11-HL
caggtgcagctggtccagtctggagctgaggtgaagaagcctggggcttcagtaaaggtgtcctgcaagacttctggatacacattcactgaatacaccatacactgggtgagacagtcccctggacagagacttgagtggatgggaggtattaatcctaacaatggtattcctaactacaatcagaagttcaagggcagggtcacaataactagagacaagtcctccagcaccgcctacatggagctcagcagcctgagatctgaggatactgcggtctattactgtgcaagaagaagaatcgcctatggttacgacgagggccatgctatggactactggggtcaaggaaccctggtcaccgtctcctcaggtggtggtggttctggcggcggcggctccggtggtggtggttctgacatcgtgatgacacagactccactctccctacctgtgacagttggagagccggcttctatcagctgcaagtccagtcagagccttttatatagtcgtaatcaaaagaactacttggcctggtacctgcagaagccagggcagtctcctcaactgctgatttactgggcatccactagggaatctggggtccctgatcgcttctcaggcagtggatctgggacagacttcaccctcaagatctctcgtgtggaggcggaggatgttggaatctattactgtcagcaatattttagctatccgctcacgttcggtggtgggaccaaggtggagatcaaa

SEQ ID NO: 1804 - protein, 507 aa, Artificial Sequence
  FA22C11 HL x I2C HL
QVQLVQSGAEVKKPGASVKVSCKTSGYTFTEYTIHWVRQSPGQRLEWMGGINPNNGIPNYNQKFKGRVTITRDKSSSTAYMELSSLRSEDTAVYYCARRRIAYGYDEGHAMDYWGQGTLVTVSSGGGGSGGGGSGGGGSDIVMTQTPLSLPVTVGEPASISCKSSQSLLYSRNQKNYLAWYLQKPGQSPQLLIYWASTRESGVPDRFSGSGSGTDFTLKISRVEAEDVGIYYCQQYFSYPLTFGGGTKVEIKSGGGGSEVQLVESGGGLVQPGGSLKLSCAASGFTFNKYAMNWVRQAPGKGLEWVARIRSKYNNYATYYADSVKDRFTISRDDSKNTAYLQMNNLKTEDTAVYYCVRHGNFGNSYISYWAYWGQGTLVTVSSGGGGSGGGGSGGGGSQTVVTQEPSLTVSPGGTVTLTCGSSTGAVTSGNYPNWVQQKPGQAPRGLIGGTKFLAPGTPARFSGSLLGGKAALTLSGVQPEDEAEYYCVLWYSNRWVFGGGTKLTVL

SEQ ID NO: 1805 - DNA, 1521 bp, Artificial Sequence
  FA22C11 HL x I2C HL
caggtgcagctggtccagtctggagctgaggtgaagaagcctggggcttcagtaaaggtgtcctgcaagacttctggatacacattcactgaatacaccatacactgggtgagacagtcccctggacagagacttgagtggatgggaggtattaatcctaacaatggtattcctaactacaatcagaagttcaagggcagggtcacaataactagagacaagtcctccagcaccgcctacatggagctcagcagcctgagatctgaggatactgcggtctattactgtgcaagaagaagaatcgcctatggttacgacgagggccatgctatggactactggggtcaaggaaccctggtcaccgtctcctcaggtggtggtggttctggcggcggcggctccggtggtggtggttctgacatcgtgatgacacagactccactctccctacctgtgacagttggagagccggcttctatcagctgcaagtccagtcagagccttttatatagtcgtaatcaaaagaactacttggcctggtacctgcagaagccagggcagtctcctcaactgctgatttactgggcatccactagggaatctggggtccctgatcgcttctcaggcagtggatctgggacagacttcaccctcaagatctctcgtgtggaggcggaggatgttggaatctattactgtcagcaatattttagctatccgctcacgttcggtggtgggaccaaggtggagatcaaatccggaggtggtggatccgaggtgcagctggtcgagtctggaggaggattggtgcagcctggagggtcattgaaactctcatgtgcagcctctggattcaccttcaataagtacgccatgaactgggtccgccaggctccaggaaagggtttggaatgggttgctcgcataagaagtaaatataataattatgcaacatattatgccgattcagtgaaagacaggttcaccatctccagagatgattcaaaaaacactgcctatctacaaatgaacaacttgaaaactgaggacactgccgtgtactactgtgtgagacatgggaacttcggtaatagctacatatcctactgggcttactggggccaagggactctggtcaccgtctcctcaggtggtggtggttctggcggcggcggctccggtggtggtggttctcagactgttgtgactcaggaaccttcactcaccgtatcacctggtggaacagtcacactcacttgtggctcctcgactggggctgttacatctggcaactacccaaactgggtccaacaaaaaccaggtcaggcaccccgtggtctaataggtgggactaagttcctcgcccccggtactcctgccagattctcaggctccctgcttggaggcaaggctgccctcaccctctcaggggtacagccagaggatgaggcagaatattactgtgttctatggtacagcaaccgctgggtgttcggtggaggaaccaaactgactgtccta

SEQ ID NO: 1806 - protein, 124 aa, Artificial Sequence
  FA22D8-H
QVQLVQSGAEVEKPGASVKVSCKASGYTFTEYTIHWVRQAPGQRLEWMGGINPNNGIPNYNQKFKGRATITIDTSSSTAYMELSSLTSEDTAVYYCARRRIAYGYDEGHAMDYWGQGTLVTVSS

SEQ ID NO: 1807 - protein, 5 aa, Artificial Sequence
  FA22D8-HCDR1
EYTIH

SEQ ID NO: 1808 - protein, 17 aa, Artificial Sequence
  FA22D8-HCDR2
GINPNNGIPNYNQKFKG

SEQ ID NO: 1809 - protein, 15 aa, Artificial Sequence
  FA22D8-HCDR3
RRIAYGYDEGHAMDY

SEQ ID NO: 1810 - DNA, 372 bp, Artificial Sequence
  FA22D8-H
caggtgcagctggtccagtctggagctgaggtggagaagcctggggcttcagtaaaggtgtcctgcaaggcttctggatacacattcactgaatacaccatacactgggtgagacaggcccctggacagagacttgagtggatgggaggtattaatcctaacaatggtattcctaactacaatcagaagttcaagggcagggccacaataactatagacacgtcctccagcaccgcctacatggagctcagcagcctgacatctgaggatactgcggtctattactgtgcaagaagaagaatcgcctatggttacgacgagggccatgctatggactactggggtcaaggaaccctggtcaccgtctcctca

SEQ ID NO: 1811 - protein, 113 aa, Artificial Sequence
  FA22D8-L
DIVMTQTPLSLPVTVGEQASISCKSSQSLLYSRNQKNYLAWYLQKPGQSPKLLIYWASTRESGVPDRFSGSGSGTDFTLKISSVEAEDVGVYYCQQYFSYPLTFGGGTKVEIK

SEQ ID NO: 1812 - protein, 17 aa, Artificial Sequence
  FA22D8-LCDR1
KSSQSLLYSRNQKNYLA

SEQ ID NO: 1813 - protein, 7 aa, Artificial Sequence
  FA22D8-LCDR2
WASTRES

SEQ ID NO: 1814 - protein, 9 aa, Artificial Sequence
  FA22D8-LCDR3
QQYFSYPLT

SEQ ID NO: 1815 - DNA, 339 bp, Artificial Sequence
  FA22D8-L
gacatcgtgatgacacagactccactctccctacctgtgacagttggagagcaggcttctatcagctgcaagtccagtcagagccttttatatagtcgtaatcaaaagaactacttggcctggtacctgcagaagccagggcagtctcctaaactgctgatttactgggcatccactagggaatctggggtccctgatcgcttctcaggcagtggatctgggacggatttcactctcaagatcagcagtgtggaggctgaggatgttggagtctattactgtcagcaatattttagctatccgctcacgttcggtggtgggaccaaggtggagatcaaa

SEQ ID NO: 1816 - protein, 252 aa, Artificial Sequence
  FA22D8-HL
QVQLVQSGAEVEKPGASVKVSCKASGYTFTEYTIHWVRQAPGQRLEWMGGINPNNGIPNYNQKFKGRATITIDTSSSTAYMELSSLTSEDTAVYYCARRRIAYGYDEGHAMDYWGQGTLVTVSSGGGGSGGGGSGGGGSDIVMTQTPLSLPVTVGEQASISCKSSQSLLYSRNQKNYLAWYLQKPGQSPKLLIYWASTRESGVPDRFSGSGSGTDFTLKISSVEAEDVGVYYCQQYFSYPLTFGGGTKVEIK

SEQ ID NO: 1817 - DNA, 756 bp, Artificial Sequence
  FA22D8-HL
caggtgcagctggtccagtctggagctgaggtggagaagcctggggcttcagtaaaggtgtcctgcaaggcttctggatacacattcactgaatacaccatacactgggtgagacaggcccctggacagagacttgagtggatgggaggtattaatcctaacaatggtattcctaactacaatcagaagttcaagggcagggccacaataactatagacacgtcctccagcaccgcctacatggagctcagcagcctgacatctgaggatactgcggtctattactgtgcaagaagaagaatcgcctatggttacgacgagggccatgctatggactactggggtcaaggaaccctggtcaccgtctcctcaggtggtggtggttctggcggcggcggctccggtggtggtggttctgacatcgtgatgacacagactccactctccctacctgtgacagttggagagcaggcttctatcagctgcaagtccagtcagagccttttatatagtcgtaatcaaaagaactacttggcctggtacctgcagaagccagggcagtctcctaaactgctgatttactgggcatccactagggaatctggggtccctgatcgcttctcaggcagtggatctgggacggatttcactctcaagatcagcagtgtggaggctgaggatgttggagtctattactgtcagcaatattttagctatccgctcacgttcggtggtgggaccaaggtggagatcaaa

SEQ ID NO: 1818 - protein, 507 aa, Artificial Sequence
  FA22D8 HL x I2C HL
QVQLVQSGAEVEKPGASVKVSCKASGYTFTEYTIHWVRQAPGQRLEWMGGINPNNGIPNYNQKFKGRATITIDTSSSTAYMELSSLTSEDTAVYYCARRRIAYGYDEGHAMDYWGQGTLVTVSSGGGGSGGGGSGGGGSDIVMTQTPLSLPVTVGEQASISCKSSQSLLYSRNQKNYLAWYLQKPGQSPKLLIYWASTRESGVPDRFSGSGSGTDFTLKISSVEAEDVGVYYCQQYFSYPLTFGGGTKVEIKSGGGGSEVQLVESGGGLVQPGGSLKLSCAASGFTFNKYAMNWVRQAPGKGLEWVARIRSKYNNYATYYADSVKDRFTISRDDSKNTAYLQMNNLKTEDTAVYYCVRHGNFGNSYISYWAYWGQGTLVTVSSGGGGSGGGGSGGGGSQTVVTQEPSLTVSPGGTVTLTCGSSTGAVTSGNYPNWVQQKPGQAPRGLIGGTKFLAPGTPARFSGSLLGGKAALTLSGVQPEDEAEYYCVLWYSNRWVFGGGTKLTVL

SEQ ID NO: 1819 - DNA, 1521 bp, Artificial Sequence
  FA22D8 HL x I2C HL
caggtgcagctggtccagtctggagctgaggtggagaagcctggggcttcagtaaaggtgtcctgcaaggcttctggatacacattcactgaatacaccatacactgggtgagacaggcccctggacagagacttgagtggatgggaggtattaatcctaacaatggtattcctaactacaatcagaagttcaagggcagggccacaataactatagacacgtcctccagcaccgcctacatggagctcagcagcctgacatctgaggatactgcggtctattactgtgcaagaagaagaatcgcctatggttacgacgagggccatgctatggactactggggtcaaggaaccctggtcaccgtctcctcaggtggtggtggttctggcggcggcggctccggtggtggtggttctgacatcgtgatgacacagactccactctccctacctgtgacagttggagagcaggcttctatcagctgcaagtccagtcagagccttttatatagtcgtaatcaaaagaactacttggcctggtacctgcagaagccagggcagtctcctaaactgctgatttactgggcatccactagggaatctggggtccctgatcgcttctcaggcagtggatctgggacggatttcactctcaagatcagcagtgtggaggctgaggatgttggagtctattactgtcagcaatattttagctatccgctcacgttcggtggtgggaccaaggtggagatcaaatccggaggtggtggatccgaggtgcagctggtcgagtctggaggaggattggtgcagcctggagggtcattgaaactctcatgtgcagcctctggattcaccttcaataagtacgccatgaactgggtccgccaggctccaggaaagggtttggaatgggttgctcgcataagaagtaaatataataattatgcaacatattatgccgattcagtgaaagacaggttcaccatctccagagatgattcaaaaaacactgcctatctacaaatgaacaacttgaaaactgaggacactgccgtgtactactgtgtgagacatgggaacttcggtaatagctacatatcctactgggcttactggggccaagggactctggtcaccgtctcctcaggtggtggtggttctggcggcggcggctccggtggtggtggttctcagactgttgtgactcaggaaccttcactcaccgtatcacctggtggaacagtcacactcacttgtggctcctcgactggggctgttacatctggcaactacccaaactgggtccaacaaaaaccaggtcaggcaccccgtggtctaataggtgggactaagttcctcgcccccggtactcctgccagattctcaggctccctgcttggaggcaaggctgccctcaccctctcaggggtacagccagaggatgaggcagaatattactgtgttctatggtacagcaaccgctgggtgttcggtggaggaaccaaactgactgtccta

SEQ ID NO: 1820 - protein, 124 aa, Artificial Sequence
  FA22E8-H
QVQLVQSGAELVKPGASVKVSCKASGYTFTEYTIHWVRQAPGQRLEWMGGINPNNGIPNYNQKFKGRATITIDTSASTAYMELRSLRSEDTAVYYCARRRIAYGYDEGHAMDYWGQGTLVTVSS

SEQ ID NO: 1821 - protein, 5 aa, Artificial Sequence
  FA22E8-HCDR1
EYTIH

SEQ ID NO: 1822 - protein, 17 aa, Artificial Sequence
  FA22E8-HCDR2
GINPNNGIPNYNQKFKG

SEQ ID NO: 1823 - protein, 15 aa, Artificial Sequence
  FA22E8-HCDR3
RRIAYGYDEGHAMDY

SEQ ID NO: 1824 - DNA, 372 bp, Artificial Sequence
  FA22E8-H
caggtgcagctggtccagtctggagctgagctggtgaagcctggggcttcagtaaaggtgtcctgcaaggcttctggatacacattcactgaatacaccatacactgggtgagacaggcccctggacagagacttgagtggatgggaggtattaatcctaacaatggtattcctaactacaatcagaagttcaagggcagggccacaataactatagacacgtccgccagcaccgcctacatggagctccgcagcctgagatctgaggatactgcggtctattactgtgcaagaagaagaatcgcctatggttacgacgagggccatgctatggactactggggtcaaggaaccctggtcaccgtctcctca

SEQ ID NO: 1825 - protein, 113 aa, Artificial Sequence
  FA22E8-L
DIVMTQTPLSLAVTPGEQASISCKSSQSLLYSRNQKNYLAWYLQKPGQSPQLLIYWASTRESGVPDRFSGSGFGTDFTLKISGVEAEDVGVYYCQQYFSYPLTFGGGTKVEIK

SEQ ID NO: 1826 - protein, 17 aa, Artificial Sequence
  FA22E8-LCDR1
KSSQSLLYSRNQKNYLA

SEQ ID NO: 1827 - protein, 7 aa, Artificial Sequence
  FA22E8-LCDR2
WASTRES

SEQ ID NO: 1828 - protein, 9 aa, Artificial Sequence
  FA22E8-LCDR3
QQYFSYPLT

SEQ ID NO: 1829 - DNA, 339 bp, Artificial Sequence
  FA22E8-L
gacatcgtgatgacacagactccactctccctagctgtgacacctggagagcaggcttctatcagctgcaagtccagtcagagccttttatatagtcgtaatcaaaagaactacttggcctggtacctgcagaagccagggcagtctcctcaactgctgatttactgggcatccactagggaatctggggtccctgatcgcttctcaggcagtggatttgggacggatttcactctcaagatcagcggagtggaggctgaggacgtgggagtttattactgtcagcaatattttagctatccgctcacgttcggtggtgggaccaaggtggagatcaaa

SEQ ID NO: 1830 - protein, 252 aa, Artificial Sequence
  FA22E8-HL
QVQLVQSGAELVKPGASVKVSCKASGYTFTEYTIHWVRQAPGQRLEWMGGINPNNGIPNYNQKFKGRATITIDTSASTAYMELRSLRSEDTAVYYCARRRIAYGYDEGHAMDYWGQGTLVTVSSGGGGSGGGGSGGGGSDIVMTQTPLSLAVTPGEQASISCKSSQSLLYSRNQKNYLAWYLQKPGQSPQLLIYWASTRESGVPDRFSGSGFGTDFTLKISGVEAEDVGVYYCQQYFSYPLTFGGGTKVEIK

SEQ ID NO: 1831 - DNA, 756 bp, Artificial Sequence
  FA22E8-HL
caggtgcagctggtccagtctggagctgagctggtgaagcctggggcttcagtaaaggtgtcctgcaaggcttctggatacacattcactgaatacaccatacactgggtgagacaggcccctggacagagacttgagtggatgggaggtattaatcctaacaatggtattcctaactacaatcagaagttcaagggcagggccacaataactatagacacgtccgccagcaccgcctacatggagctccgcagcctgagatctgaggatactgcggtctattactgtgcaagaagaagaatcgcctatggttacgacgagggccatgctatggactactggggtcaaggaaccctggtcaccgtctcctcaggtggtggtggttctggcggcggcggctccggtggtggtggttctgacatcgtgatgacacagactccactctccctagctgtgacacctggagagcaggcttctatcagctgcaagtccagtcagagccttttatatagtcgtaatcaaaagaactacttggcctggtacctgcagaagccagggcagtctcctcaactgctgatttactgggcatccactagggaatctggggtccctgatcgcttctcaggcagtggatttgggacggatttcactctcaagatcagcggagtggaggctgaggacgtgggagtttattactgtcagcaatattttagctatccgctcacgttcggtggtgggaccaaggtggagatcaaa

SEQ ID NO: 1832 - protein, 507 aa, Artificial Sequence
  FA22E8 HL x I2C HL
QVQLVQSGAELVKPGASVKVSCKASGYTFTEYTIHWVRQAPGQRLEWMGGINPNNGIPNYNQKFKGRATITIDTSASTAYMELRSLRSEDTAVYYCARRRIAYGYDEGHAMDYWGQGTLVTVSSGGGGSGGGGSGGGGSDIVMTQTPLSLAVTPGEQASISCKSSQSLLYSRNQKNYLAWYLQKPGQSPQLLIYWASTRESGVPDRFSGSGFGTDFTLKISGVEAEDVGVYYCQQYFSYPLTFGGGTKVEIKSGGGGSEVQLVESGGGLVQPGGSLKLSCAASGFTFNKYAMNWVRQAPGKGLEWVARIRSKYNNYATYYADSVKDRFTISRDDSKNTAYLQMNNLKTEDTAVYYCVRHGNFGNSYISYWAYWGQGTLVTVSSGGGGSGGGGSGGGGSQTVVTQEPSLTVSPGGTVTLTCGSSTGAVTSGNYPNWVQQKPGQAPRGLIGGTKFLAPGTPARFSGSLLGGKAALTLSGVQPEDEAEYYCVLWYSNRWVFGGGTKLTVL

SEQ ID NO: 1833 - DNA, 1521 bp, Artificial Sequence
  FA22E8 HL x I2C HL
caggtgcagctggtccagtctggagctgagctggtgaagcctggggcttcagtaaaggtgtcctgcaaggcttctggatacacattcactgaatacaccatacactgggtgagacaggcccctggacagagacttgagtggatgggaggtattaatcctaacaatggtattcctaactacaatcagaagttcaagggcagggccacaataactatagacacgtccgccagcaccgcctacatggagctccgcagcctgagatctgaggatactgcggtctattactgtgcaagaagaagaatcgcctatggttacgacgagggccatgctatggactactggggtcaaggaaccctggtcaccgtctcctcaggtggtggtggttctggcggcggcggctccggtggtggtggttctgacatcgtgatgacacagactccactctccctagctgtgacacctggagagcaggcttctatcagctgcaagtccagtcagagccttttatatagtcgtaatcaaaagaactacttggcctggtacctgcagaagccagggcagtctcctcaactgctgatttactgggcatccactagggaatctggggtccctgatcgcttctcaggcagtggatttgggacggatttcactctcaagatcagcggagtggaggctgaggacgtgggagtttattactgtcagcaatattttagctatccgctcacgttcggtggtgggaccaaggtggagatcaaatccggaggtggtggatccgaggtgcagctggtcgagtctggaggaggattggtgcagcctggagggtcattgaaactctcatgtgcagcctctggattcaccttcaataagtacgccatgaactgggtccgccaggctccaggaaagggtttggaatgggttgctcgcataagaagtaaatataataattatgcaacatattatgccgattcagtgaaagacaggttcaccatctccagagatgattcaaaaaacactgcctatctacaaatgaacaacttgaaaactgaggacactgccgtgtactactgtgtgagacatgggaacttcggtaatagctacatatcctactgggcttactggggccaagggactctggtcaccgtctcctcaggtggtggtggttctggcggcggcggctccggtggtggtggttctcagactgttgtgactcaggaaccttcactcaccgtatcacctggtggaacagtcacactcacttgtggctcctcgactggggctgttacatctggcaactacccaaactgggtccaacaaaaaccaggtcaggcaccccgtggtctaataggtgggactaagttcctcgcccccggtactcctgccagattctcaggctccctgcttggaggcaaggctgccctcaccctctcaggggtacagccagaggatgaggcagaatattactgtgttctatggtacagcaaccgctgggtgttcggtggaggaaccaaactgactgtccta

SEQ ID NO: 1834 - protein, 124 aa, Artificial Sequence
  FA20H3-H
QVQLVQSGAEVKKPGASVKMSCKTSGYTFTEYTIHWVRQAPGQRLEWMGGINPNNGIPNYNQKFKGRATITRDTSSSTAYMELSSLRSEDTAVYYCARRRIAYGYDEGHAMDYWGQGTLVTVSS

SEQ ID NO: 1835 - protein, 5 aa, Artificial Sequence
  FA20H3-HCDR1
EYTIH

SEQ ID NO: 1836 - protein, 17 aa, Artificial Sequence
  FA20H3-HCDR2
GINPNNGIPNYNQKFKG

SEQ ID NO: 1837 - protein, 15 aa, Artificial Sequence
  FA20H3-HCDR3
RRIAYGYDEGHAMDY

SEQ ID NO: 1838 - DNA, 372 bp, Artificial Sequence
  FA20H3-H
caggtgcagctggtccagtctggagctgaggtgaagaagcctggggcttcagtaaagatgtcctgcaagacttctggatacacattcactgaatacaccatacactgggtgagacaggcccctggacagagacttgagtggatgggaggtattaatcctaacaatggtattcctaactacaatcagaagttcaagggcagggccacaataactagagacacgtcctccagcaccgcctacatggagctcagcagcctgagatctgaggatactgcggtctattactgtgcaagaagaagaatcgcctatggttacgacgagggccatgctatggactactggggtcaaggaaccctggtcaccgtctcctca

SEQ ID NO: 1839 - protein, 113 aa, Artificial Sequence
  FA20H3-L
DIVMTQTPFSLPVTPGEPASISCKSSQSLLYSRNQKNYLAWYQQKPGQSPQLLIYWASTRESGVPDRFSGSGSGTDFTLNISRVEAEDVGVYYCQQYFSYPLTFGGGTKVEIK

SEQ ID NO: 1840 - protein, 17 aa, Artificial Sequence
  FA20H3-LCDR1
KSSQSLLYSRNQKNYLA

SEQ ID NO: 1841 - protein, 7 aa, Artificial Sequence
  FA20H3-LCDR2
WASTRES

SEQ ID NO: 1842 - protein, 9 aa, Artificial Sequence
  FA20H3-LCDR3
QQYFSYPLT

SEQ ID NO: 1843 - DNA, 339 bp, Artificial Sequence
  FA20H3-L
gacatcgtgatgacacagactccattctccctacctgtgacacctggagagccggcttctatcagctgcaagtccagtcagagccttttatatagtcgtaatcaaaagaactacttggcctggtaccagcagaagccagggcagtctcctcaactgctgatttactgggcatccactagggaatctggggtccctgatcgcttctcaggcagtggatctgggacagacttcaccctcaatatctctcgtgtggaggcggaggatgttggagtctattactgtcagcaatattttagctatccgctcacgttcggtggtgggaccaaggtggagatcaaa

SEQ ID NO: 1844 - protein, 252 aa, Artificial Sequence
  FA20H3-HL
QVQLVQSGAEVKKPGASVKMSCKTSGYTFTEYTIHWVRQAPGQRLEWMGGINPNNGIPNYNQKFKGRATITRDTSSSTAYMELSSLRSEDTAVYYCARRRIAYGYDEGHAMDYWGQGTLVTVSSGGGGSGGGGSGGGGSDIVMTQTPFSLPVTPGEPASISCKSSQSLLYSRNQKNYLAWYQQKPGQSPQLLIYWASTRESGVPDRFSGSGSGTDFTLNISRVEAEDVGVYYCQQYFSYPLTFGGGTKVEIK

SEQ ID NO: 1845 - DNA, 756 bp, Artificial Sequence
  FA20H3-HL
caggtgcagctggtccagtctggagctgaggtgaagaagcctggggcttcagtaaagatgtcctgcaagacttctggatacacattcactgaatacaccatacactgggtgagacaggcccctggacagagacttgagtggatgggaggtattaatcctaacaatggtattcctaactacaatcagaagttcaagggcagggccacaataactagagacacgtcctccagcaccgcctacatggagctcagcagcctgagatctgaggatactgcggtctattactgtgcaagaagaagaatcgcctatggttacgacgagggccatgctatggactactggggtcaaggaaccctggtcaccgtctcctcaggtggtggtggttctggcggcggcggctccggtggtggtggttctgacatcgtgatgacacagactccattctccctacctgtgacacctggagagccggcttctatcagctgcaagtccagtcagagccttttatatagtcgtaatcaaaagaactacttggcctggtaccagcagaagccagggcagtctcctcaactgctgatttactgggcatccactagggaatctggggtccctgatcgcttctcaggcagtggatctgggacagacttcaccctcaatatctctcgtgtggaggcggaggatgttggagtctattactgtcagcaatattttagctatccgctcacgttcggtggtgggaccaaggtggagatcaaa

SEQ ID NO: 1846 - protein, 507 aa, Artificial Sequence
  FA20H3 HL x I2C HL
QVQLVQSGAEVKKPGASVKMSCKTSGYTFTEYTIHWVRQAPGQRLEWMGGINPNNGIPNYNQKFKGRATITRDTSSSTAYMELSSLRSEDTAVYYCARRRIAYGYDEGHAMDYWGQGTLVTVSSGGGGSGGGGSGGGGSDIVMTQTPFSLPVTPGEPASISCKSSQSLLYSRNQKNYLAWYQQKPGQSPQLLIYWASTRESGVPDRFSGSGSGTDFTLNISRVEAEDVGVYYCQQYFSYPLTFGGGTKVEIKSGGGGSEVQLVESGGGLVQPGGSLKLSCAASGFTFNKYAMNWVRQAPGKGLEWVARIRSKYNNYATYYADSVKDRFTISRDDSKNTAYLQMNNLKTEDTAVYYCVRHGNFGNSYISYWAYWGQGTLVTVSSGGGGSGGGGSGGGGSQTVVTQEPSLTVSPGGTVTLTCGSSTGAVTSGNYPNWVQQKPGQAPRGLIGGTKFLAPGTPARFSGSLLGGKAALTLSGVQPEDEAEYYCVLWYSNRWVFGGGTKLTVL

SEQ ID NO: 1847 - DNA, 1521 bp, Artificial Sequence
  FA20H3 HL x I2C HL
caggtgcagctggtccagtctggagctgaggtgaagaagcctggggcttcagtaaagatgtcctgcaagacttctggatacacattcactgaatacaccatacactgggtgagacaggcccctggacagagacttgagtggatgggaggtattaatcctaacaatggtattcctaactacaatcagaagttcaagggcagggccacaataactagagacacgtcctccagcaccgcctacatggagctcagcagcctgagatctgaggatactgcggtctattactgtgcaagaagaagaatcgcctatggttacgacgagggccatgctatggactactggggtcaaggaaccctggtcaccgtctcctcaggtggtggtggttctggcggcggcggctccggtggtggtggttctgacatcgtgatgacacagactccattctccctacctgtgacacctggagagccggcttctatcagctgcaagtccagtcagagccttttatatagtcgtaatcaaaagaactacttggcctggtaccagcagaagccagggcagtctcctcaactgctgatttactgggcatccactagggaatctggggtccctgatcgcttctcaggcagtggatctgggacagacttcaccctcaatatctctcgtgtggaggcggaggatgttggagtctattactgtcagcaatattttagctatccgctcacgttcggtggtgggaccaaggtggagatcaaatccggaggtggtggatccgaggtgcagctggtcgagtctggaggaggattggtgcagcctggagggtcattgaaactctcatgtgcagcctctggattcaccttcaataagtacgccatgaactgggtccgccaggctccaggaaagggtttggaatgggttgctcgcataagaagtaaatataataattatgcaacatattatgccgattcagtgaaagacaggttcaccatctccagagatgattcaaaaaacactgcctatctacaaatgaacaacttgaaaactgaggacactgccgtgtactactgtgtgagacatgggaacttcggtaatagctacatatcctactgggcttactggggccaagggactctggtcaccgtctcctcaggtggtggtggttctggcggcggcggctccggtggtggtggttctcagactgttgtgactcaggaaccttcactcaccgtatcacctggtggaacagtcacactcacttgtggctcctcgactggggctgttacatctggcaactacccaaactgggtccaacaaaaaccaggtcaggcaccccgtggtctaataggtgggactaagttcctcgcccccggtactcctgccagattctcaggctccctgcttggaggcaaggctgccctcaccctctcaggggtacagccagaggatgaggcagaatattactgtgttctatggtacagcaaccgctgggtgttcggtggaggaaccaaactgactgtccta

SEQ ID NO: 1848 - protein, 124 aa, Artificial Sequence
  FA19D12-H
QVQLVQSGAEVKKPGASVKVSCKASGYTFTEYTIHWVRQAHGQSLEWMGGINPNNGIPNYNQKFKGRVTITVDTSASTAYMELRSLRSEDTAVYYCARRRIAYGYDEGHAMDYWGQGTLVTVSS

SEQ ID NO: 1849 - protein, 5 aa, Artificial Sequence
  FA19D12-HCDR1
EYTIH

SEQ ID NO: 1850 - protein, 17 aa, Artificial Sequence
  FA19D12-HCDR2
GINPNNGIPNYNQKFKG

SEQ ID NO: 1851 - protein, 15 aa, Artificial Sequence
  FA19D12-HCDR3
RRIAYGYDEGHAMDY

SEQ ID NO: 1852 - DNA, 417 bp, Artificial Sequence
  FA19D12-H
caggtgcagctggtccagtctggagctgaggtgaagaagcctggggcttcagtaaaggtgtcctgcaaggcttctggatacacattcactgaatacaccatacactgggtgagacaggcccatggacagagccttgagtggatgggaggtattaatcctaacaatggtattcctaactacaatcagaagttcaagggcagggtcacaataactgtagacacgtccgccagcaccgcctacatggagctccgcagcctgagatctgaggatactgcggtctattactgtgcaagaagaagaatcgcctatggttacgacgagggccatgctatggactactggggtcaaggaaccctggtcaccgtctcctcaggtggtggtggttctggcggcggcggctccggtggtggtggttct

SEQ ID NO: 1853 - protein, 113 aa, Artificial Sequence
  FA19D12-L
DIVMTQTPFSLPVTPGEPASISCKSSQSLLYSRNQKNYLAWYQQKPGQSPKLLIYWASTRESGVPDRFSGSGSGTDFTLKISRVEAEDVGVYYCQQYFSYPLTFGGGTKVEIK

SEQ ID NO: 1854 - protein, 17 aa, Artificial Sequence
  FA19D12-LCDR1
KSSQSLLYSRNQKNYLA

SEQ ID NO: 1855 - protein, 7 aa, Artificial Sequence
  FA19D12-LCDR2
WASTRES

SEQ ID NO: 1856 - protein, 9 aa, Artificial Sequence
  FA19D12-LCDR3
QQYFSYPLT

SEQ ID NO: 1857 - DNA, 339 bp, Artificial Sequence
  FA19D12-L
gacatcgtgatgacacagactccattctccctacctgtgacacctggagagccggcttctatcagctgcaagtccagtcagagccttttatatagtcgtaatcaaaagaactacttggcctggtaccagcagaagccagggcagtctcctaaactgctgatttactgggcatccactagggaatctggggtccctgatcgcttctcaggcagtggatctgggacggatttcactctcaaaatctccagagtggaggctgaggacgtgggagtttattactgtcagcaatattttagctatccgctcacgttcggtggtgggaccaaggtggagatcaaa

SEQ ID NO: 1858 - protein, 252 aa, Artificial Sequence
  FA19D12-HL
QVQLVQSGAEVKKPGASVKVSCKASGYTFTEYTIHWVRQAHGQSLEWMGGINPNNGIPNYNQKFKGRVTITVDTSASTAYMELRSLRSEDTAVYYCARRRIAYGYDEGHAMDYWGQGTLVTVSSGGGGSGGGGSGGGGSDIVMTQTPFSLPVTPGEPASISCKSSQSLLYSRNQKNYLAWYQQKPGQSPKLLIYWASTRESGVPDRFSGSGSGTDFTLKISRVEAEDVGVYYCQQYFSYPLTFGGGTKVEIK

SEQ ID NO: 1859 - DNA, 756 bp, Artificial Sequence
  FA19D12-HL
caggtgcagctggtccagtctggagctgaggtgaagaagcctggggcttcagtaaaggtgtcctgcaaggcttctggatacacattcactgaatacaccatacactgggtgagacaggcccatggacagagccttgagtggatgggaggtattaatcctaacaatggtattcctaactacaatcagaagttcaagggcagggtcacaataactgtagacacgtccgccagcaccgcctacatggagctccgcagcctgagatctgaggatactgcggtctattactgtgcaagaagaagaatcgcctatggttacgacgagggccatgctatggactactggggtcaaggaaccctggtcaccgtctcctcaggtggtggtggttctggcggcggcggctccggtggtggtggttctgacatcgtgatgacacagactccattctccctacctgtgacacctggagagccggcttctatcagctgcaagtccagtcagagccttttatatagtcgtaatcaaaagaactacttggcctggtaccagcagaagccagggcagtctcctaaactgctgatttactgggcatccactagggaatctggggtccctgatcgcttctcaggcagtggatctgggacggatttcactctcaaaatctccagagtggaggctgaggacgtgggagtttattactgtcagcaatattttagctatccgctcacgttcggtggtgggaccaaggtggagatcaaa

SEQ ID NO: 1860 - protein, 507 aa, Artificial Sequence
  FA19D12HL x I2C HL
QVQLVQSGAEVKKPGASVKVSCKASGYTFTEYTIHWVRQAHGQSLEWMGGINPNNGIPNYNQKFKGRVTITVDTSASTAYMELRSLRSEDTAVYYCARRRIAYGYDEGHAMDYWGQGTLVTVSSGGGGSGGGGSGGGGSDIVMTQTPFSLPVTPGEPASISCKSSQSLLYSRNQKNYLAWYQQKPGQSPKLLIYWASTRESGVPDRFSGSGSGTDFTLKISRVEAEDVGVYYCQQYFSYPLTFGGGTKVEIKSGGGGSEVQLVESGGGLVQPGGSLKLSCAASGFTFNKYAMNWVRQAPGKGLEWVARIRSKYNNYATYYADSVKDRFTISRDDSKNTAYLQMNNLKTEDTAVYYCVRHGNFGNSYISYWAYWGQGTLVTVSSGGGGSGGGGSGGGGSQTVVTQEPSLTVSPGGTVTLTCGSSTGAVTSGNYPNWVQQKPGQAPRGLIGGTKFLAPGTPARFSGSLLGGKAALTLSGVQPEDEAEYYCVLWYSNRWVFGGGTKLTVL

SEQ ID NO: 1861 - DNA, 1521 bp, Artificial Sequence
  FA19D12HL x I2C HL
caggtgcagctggtccagtctggagctgaggtgaagaagcctggggcttcagtaaaggtgtcctgcaaggcttctggatacacattcactgaatacaccatacactgggtgagacaggcccatggacagagccttgagtggatgggaggtattaatcctaacaatggtattcctaactacaatcagaagttcaagggcagggtcacaataactgtagacacgtccgccagcaccgcctacatggagctccgcagcctgagatctgaggatactgcggtctattactgtgcaagaagaagaatcgcctatggttacgacgagggccatgctatggactactggggtcaaggaaccctggtcaccgtctcctcaggtggtggtggttctggcggcggcggctccggtggtggtggttctgacatcgtgatgacacagactccattctccctacctgtgacacctggagagccggcttctatcagctgcaagtccagtcagagccttttatatagtcgtaatcaaaagaactacttggcctggtaccagcagaagccagggcagtctcctaaactgctgatttactgggcatccactagggaatctggggtccctgatcgcttctcaggcagtggatctgggacggatttcactctcaaaatctccagagtggaggctgaggacgtgggagtttattactgtcagcaatattttagctatccgctcacgttcggtggtgggaccaaggtggagatcaaatccggaggtggtggatccgaggtgcagctggtcgagtctggaggaggattggtgcagcctggagggtcattgaaactctcatgtgcagcctctggattcaccttcaataagtacgccatgaactgggtccgccaggctccaggaaagggtttggaatgggttgctcgcataagaagtaaatataataattatgcaacatattatgccgattcagtgaaagacaggttcaccatctccagagatgattcaaaaaacactgcctatctacaaatgaacaacttgaaaactgaggacactgccgtgtactactgtgtgagacatgggaacttcggtaatagctacatatcctactgggcttactggggccaagggactctggtcaccgtctcctcaggtggtggtggttctggcggcggcggctccggtggtggtggttctcagactgttgtgactcaggaaccttcactcaccgtatcacctggtggaacagtcacactcacttgtggctcctcgactggggctgttacatctggcaactacccaaactgggtccaacaaaaaccaggtcaggcaccccgtggtctaataggtgggactaagttcctcgcccccggtactcctgccagattctcaggctccctgcttggaggcaaggctgccctcaccctctcaggggtacagccagaggatgaggcagaatattactgtgttctatggtacagcaaccgctgggtgttcggtggaggaaccaaactgactgtccta

SEQ ID NO: 1862 - protein, 124 aa, Artificial Sequence
  FA19D9-H
QVQLVQSGAEVKKPGASVKVSCKTSGYTFTEYTIHWVRQAPGQRLEWMGGINPNNGIPNYNQKFKGRATLTIDTSASTAYMELSSLTSEDTAVYYCARRRIAYGYDEGHAMDYWGQGTLVTVSS

SEQ ID NO: 1863 - protein, 5 aa, Artificial Sequence
  FA19D9-HCDR1
EYTIH

SEQ ID NO: 1864 - protein, 17 aa, Artificial Sequence
  FA19D9-HCDR2
GINPNNGIPNYNQKFKG

SEQ ID NO: 1865 - protein, 15 aa, Artificial Sequence
  FA19D9-HCDR3
RRIAYGYDEGHAMDY

SEQ ID NO: 1866 - DNA, 372 bp, Artificial Sequence
  FA19D9-H
caggtgcagctggtccagtctggagctgaggtgaagaagcctggggcttcagtaaaggtgtcctgcaagacttctggatacacattcactgaatacaccatacactgggtgagacaggcccctggacagagacttgagtggatgggaggtattaatcctaacaatggtattcctaactacaatcagaagttcaagggcagggccacattaactatagacacgtccgccagcaccgcctacatggagctcagcagcctgacatctgaggatactgcggtctattactgtgcaagaagaagaatcgcctatggttacgacgagggccatgctatggactactggggtcaaggaaccctggtcaccgtctcctca

SEQ ID NO: 1867 - protein, 113 aa, Artificial Sequence
  FA19D9-L
DIVMTQTPLSLPVTPGEPASMSCKSSQSLLYSRNQKNYLAWFLQKPGQSPKLLIYWASTRESGVPDRFSGSGSGTDFTLKISRVEAEDVGVYYCQQYFSYPLTFGGGTKVEIK

SEQ ID NO: 1868 - protein, 17 aa, Artificial Sequence
  FA19D9-LCDR1
KSSQSLLYSRNQKNYLA

SEQ ID NO: 1869 - protein, 7 aa, Artificial Sequence
  FA19D9-LCDR2
WASTRES

SEQ ID NO: 1870 - protein, 9 aa, Artificial Sequence
  FA19D9-LCDR3
QQYFSYPLT

SEQ ID NO: 1871 - DNA, 339 bp, Artificial Sequence
  FA19D9-L
gacatcgtgatgacacagactccactctccctacctgtgacacctggagagccggcttctatgagctgcaagtccagtcagagccttttatatagtcgtaatcaaaagaactacttggcctggttcctgcagaagccagggcagtctcctaaactgctgatttactgggcatccactagggaatctggggtccctgatcgcttctcaggcagtggatctgggacggatttcactctcaagatcagcagagtggaggctgaggacgtgggagtttattactgtcagcaatattttagctatccgctcacgttcggtggtgggaccaaggtggagatcaaa

SEQ ID NO: 1872 - protein, 252 aa, Artificial Sequence
  FA19D9-HL
QVQLVQSGAEVKKPGASVKVSCKTSGYTFTEYTIHWVRQAPGQRLEWMGGINPNNGIPNYNQKFKGRATLTIDTSASTAYMELSSLTSEDTAVYYCARRRIAYGYDEGHAMDYWGQGTLVTVSSGGGGSGGGGSGGGGSDIVMTQTPLSLPVTPGEPASMSCKSSQSLLYSRNQKNYLAWFLQKPGQSPKLLIYWASTRESGVPDRFSGSGSGTDFTLKISRVEAEDVGVYYCQQYFSYPLTFGGGTKVEIK

SEQ ID NO: 1873 - DNA, 756 bp, Artificial Sequence
  FA19D9-HL
caggtgcagctggtccagtctggagctgaggtgaagaagcctggggcttcagtaaaggtgtcctgcaagacttctggatacacattcactgaatacaccatacactgggtgagacaggcccctggacagagacttgagtggatgggaggtattaatcctaacaatggtattcctaactacaatcagaagttcaagggcagggccacattaactatagacacgtccgccagcaccgcctacatggagctcagcagcctgacatctgaggatactgcggtctattactgtgcaagaagaagaatcgcctatggttacgacgagggccatgctatggactactggggtcaaggaaccctggtcaccgtctcctcaggtggtggtggttctggcggcggcggctccggtggtggtggttctgacatcgtgatgacacagactccactctccctacctgtgacacctggagagccggcttctatgagctgcaagtccagtcagagccttttatatagtcgtaatcaaaagaactacttggcctggttcctgcagaagccagggcagtctcctaaactgctgatttactgggcatccactagggaatctggggtccctgatcgcttctcaggcagtggatctgggacggatttcactctcaagatcagcagagtggaggctgaggacgtgggagtttattactgtcagcaatattttagctatccgctcacgttcggtggtgggaccaaggtggagatcaaa

SEQ ID NO: 1874 - protein, 507 aa, Artificial Sequence
  FA19D9HL x I2C HL
QVQLVQSGAEVKKPGASVKVSCKTSGYTFTEYTIHWVRQAPGQRLEWMGGINPNNGIPNYNQKFKGRATLTIDTSASTAYMELSSLTSEDTAVYYCARRRIAYGYDEGHAMDYWGQGTLVTVSSGGGGSGGGGSGGGGSDIVMTQTPLSLPVTPGEPASMSCKSSQSLLYSRNQKNYLAWFLQKPGQSPKLLIYWASTRESGVPDRFSGSGSGTDFTLKISRVEAEDVGVYYCQQYFSYPLTFGGGTKVEIKSGGGGSEVQLVESGGGLVQPGGSLKLSCAASGFTFNKYAMNWVRQAPGKGLEWVARIRSKYNNYATYYADSVKDRFTISRDDSKNTAYLQMNNLKTEDTAVYYCVRHGNFGNSYISYWAYWGQGTLVTVSSGGGGSGGGGSGGGGSQTVVTQEPSLTVSPGGTVTLTCGSSTGAVTSGNYPNWVQQKPGQAPRGLIGGTKFLAPGTPARFSGSLLGGKAALTLSGVQPEDEAEYYCVLWYSNRWVFGGGTKLTVL

SEQ ID NO: 1875 - DNA, 1521 bp, Artificial Sequence
  FA19D9HL x I2C HL
caggtgcagctggtccagtctggagctgaggtgaagaagcctggggcttcagtaaaggtgtcctgcaagacttctggatacacattcactgaatacaccatacactgggtgagacaggcccctggacagagacttgagtggatgggaggtattaatcctaacaatggtattcctaactacaatcagaagttcaagggcagggccacattaactatagacacgtccgccagcaccgcctacatggagctcagcagcctgacatctgaggatactgcggtctattactgtgcaagaagaagaatcgcctatggttacgacgagggccatgctatggactactggggtcaaggaaccctggtcaccgtctcctcaggtggtggtggttctggcggcggcggctccggtggtggtggttctgacatcgtgatgacacagactccactctccctacctgtgacacctggagagccggcttctatgagctgcaagtccagtcagagccttttatatagtcgtaatcaaaagaactacttggcctggttcctgcagaagccagggcagtctcctaaactgctgatttactgggcatccactagggaatctggggtccctgatcgcttctcaggcagtggatctgggacggatttcactctcaagatcagcagagtggaggctgaggacgtgggagtttattactgtcagcaatattttagctatccgctcacgttcggtggtgggaccaaggtggagatcaaatccggaggtggtggatccgaggtgcagctggtcgagtctggaggaggattggtgcagcctggagggtcattgaaactctcatgtgcagcctctggattcaccttcaataagtacgccatgaactgggtccgccaggctccaggaaagggtttggaatgggttgctcgcataagaagtaaatataataattatgcaacatattatgccgattcagtgaaagacaggttcaccatctccagagatgattcaaaaaacactgcctatctacaaatgaacaacttgaaaactgaggacactgccgtgtactactgtgtgagacatgggaacttcggtaatagctacatatcctactgggcttactggggccaagggactctggtcaccgtctcctcaggtggtggtggttctggcggcggcggctccggtggtggtggttctcagactgttgtgactcaggaaccttcactcaccgtatcacctggtggaacagtcacactcacttgtggctcctcgactggggctgttacatctggcaactacccaaactgggtccaacaaaaaccaggtcaggcaccccgtggtctaataggtgggactaagttcctcgcccccggtactcctgccagattctcaggctccctgcttggaggcaaggctgccctcaccctctcaggggtacagccagaggatgaggcagaatattactgtgttctatggtacagcaaccgctgggtgttcggtggaggaaccaaactgactgtccta

SEQ ID NO: 1876 - protein, 122 aa, Mus sp.
EVQLLESGGGLVQPGGSLKLSCAASGFDFSRYWMSWVRQAPGKGLEWIGEINPDSSTINYTPSLKDKFIISRDNAKNTLYLQMSKVRSEDTALYYCAGGYYRYPYYYTMDYWGQGTTVTVSS

SEQ ID NO: 1877 - protein, 5 aa, Mus sp.
RYWMS

SEQ ID NO: 1878 - protein, 17 aa, Mus sp.
EINPDSSTINYTPSLKD

SEQ ID NO: 1879 - protein, 13 aa, Mus sp.
GYYRYPYYYTMDY

SEQ ID NO: 1880 - DNA, 366 bp, Mus sp.
gaggtgcagctgctcgagtctggaggtggcctggtgcagcctggaggatccctgaaactctcctgtgcagcctcaggattcgattttagtagatactggatgagttgggtccggcaggctccagggaaagggctagaatggattggagaaattaatccagatagcagtacgataaactatacgccatctctaaaggataaattcatcatctccagagacaacgccaaaaatacgctgtacctgcaaatgagcaaagtgagatctgaggacacagccctttattactgtgcaggaggatactataggtacccatattactatactatggactactggggccaagggaccacggtcaccgtctcctca

SEQ ID NO: 1881 - protein, 107 aa, Mus sp.
ELVMTQSPASLSASVGETVTITCRASGNIHNYLAWYQQKQGKSPQLLVYNAKTLADGVPSRFSGSGSGTQYSLKINSLQPEDFGSYYCQHFWSTPYTFGGGTKLEIK

SEQ ID NO: 1882 - protein, 11 aa, Mus sp.
RASGNIHNYLA

SEQ ID NO: 1883 - protein, 7 aa, Mus sp.
NAKTLAD

SEQ ID NO: 1884 - protein, 9 aa, Mus sp.
QHFWSTPYT

SEQ ID NO: 1885 - DNA, 321 bp, Mus sp.
gagctcgtgatgacacagtctccagcctccctatctgcatctgtgggagaaactgtcaccatcacatgtcgagcaagtgggaatattcacaattatttagcatggtatcagcagaaacagggaaaatctcctcagctcctggtctataatgcaaaaaccttagcagatggtgtgccatcaaggttcagtggcagtggatcaggaacacaatattctctcaagatcaacagcctgcagcctgaagattttgggagttattactgtcaacatttttggagtactccgtacacgttcggaggggggaccaagcttgagatcaaa

SEQ ID NO: 1886 - protein, 244 aa, Mus sp.
EVQLLESGGGLVQPGGSLKLSCAASGFDFSRYWMSWVRQAPGKGLEWIGEINPDSSTINYTPSLKDKFIISRDNAKNTLYLQMSKVRSEDTALYYCAGGYYRYPYYYTMDYWGQGTTVTVSSGGGGSGGGGSGGGGSELVMTQSPASLSASVGETVTITCRASGNIHNYLAWYQQKQGKSPQLLVYNAKTLADGVPSRFSGSGSGTQYSLKINSLQPEDFGSYYCQHFWSTPYTFGGGTKLEIK

SEQ ID NO: 1887 - DNA, 732 bp, Mus sp.
gaggtgcagctgctcgagtctggaggtggcctggtgcagcctggaggatccctgaaactctcctgtgcagcctcaggattcgattttagtagatactggatgagttgggtccggcaggctccagggaaagggctagaatggattggagaaattaatccagatagcagtacgataaactatacgccatctctaaaggataaattcatcatctccagagacaacgccaaaaatacgctgtacctgcaaatgagcaaagtgagatctgaggacacagccctttattactgtgcaggaggatactataggtacccatattactatactatggactactggggccaagggaccacggtcaccgtctcctcaggtggtggtggttctggcggcggcggctccggtggtggtggttctgagctcgtgatgacacagtctccagcctccctatctgcatctgtgggagaaactgtcaccatcacatgtcgagcaagtgggaatattcacaattatttagcatggtatcagcagaaacagggaaaatctcctcagctcctggtctataatgcaaaaaccttagcagatggtgtgccatcaaggttcagtggcagtggatcaggaacacaatattctctcaagatcaacagcctgcagcctgaagattttgggagttattactgtcaacatttttggagtactccgtacacgttcggaggggggaccaagcttgagatcaaa

SEQ ID NO: 1888 - protein, 499 aa, Mus sp.
EVQLLESGGGLVQPGGSLKLSCAASGFDFSRYWMSWVRQAPGKGLEWIGEINPDSSTINYTPSLKDKFIISRDNAKNTLYLQMSKVRSEDTALYYCAGGYYRYPYYYTMDYWGQGTTVTVSSGGGGSGGGGSGGGGSELVMTQSPASLSASVGETVTITCRASGNIHNYLAWYQQKQGKSPQLLVYNAKTLADGVPSRFSGSGSGTQYSLKINSLQPEDFGSYYCQHFWSTPYTFGGGTKLEIKSGGGGSEVQLVESGGGLVQPGGSLKLSCAASGFTFNKYAMNWVRQAPGKGLEWVARIRSKYNNYATYYADSVKDRFTISRDDSKNTAYLQMNNLKTEDTAVYYCVRHGNFGNSYISYWAYWGQGTLVTVSSGGGGSGGGGSGGGGSQTVVTQEPSLTVSPGGTVTLTCGSSTGAVTSGNYPNWVQQKPGQAPRGLIGGTKFLAPGTPARFSGSLLGGKAALTLSGVQPEDEAEYYCVLWYSNRWVFGGGTKLTVL

SEQ ID NO: 1889 - DNA, 1497 bp, Mus sp.
gaggtgcagctgctcgagtctggaggtggcctggtgcagcctggaggatccctgaaactctcctgtgcagcctcaggattcgattttagtagatactggatgagttgggtccggcaggctccagggaaagggctagaatggattggagaaattaatccagatagcagtacgataaactatacgccatctctaaaggataaattcatcatctccagagacaacgccaaaaatacgctgtacctgcaaatgagcaaagtgagatctgaggacacagccctttattactgtgcaggaggatactataggtacccatattactatactatggactactggggccaagggaccacggtcaccgtctcctcaggtggtggtggttctggcggcggcggctccggtggtggtggttctgagctcgtgatgacacagtctccagcctccctatctgcatctgtgggagaaactgtcaccatcacatgtcgagcaagtgggaatattcacaattatttagcatggtatcagcagaaacagggaaaatctcctcagctcctggtctataatgcaaaaaccttagcagatggtgtgccatcaaggttcagtggcagtggatcaggaacacaatattctctcaagatcaacagcctgcagcctgaagattttgggagttattactgtcaacatttttggagtactccgtacacgttcggaggggggaccaagcttgagatcaaatccggaggtggtggatccgaggtgcagctggtcgagtctggaggaggattggtgcagcctggagggtcattgaaactctcatgtgcagcctctggattcaccttcaataagtacgccatgaactgggtccgccaggctccaggaaagggtttggaatgggttgctcgcataagaagtaaatataataattatgcaacatattatgccgattcagtgaaagacaggttcaccatctccagagatgattcaaaaaacactgcctatctacaaatgaacaacttgaaaactgaggacactgccgtgtactactgtgtgagacatgggaacttcggtaatagctacatatcctactgggcttactggggccaagggactctggtcaccgtctcctcaggtggtggtggttctggcggcggcggctccggtggtggtggttctcagactgttgtgactcaggaaccttcactcaccgtatcacctggtggaacagtcacactcacttgtggctcctcgactggggctgttacatctggcaactacccaaactgggtccaacaaaaaccaggtcaggcaccccgtggtctaataggtgggactaagttcctcgcccccggtactcctgccagattctcaggctccctgcttggaggcaaggctgccctcaccctctcaggggtacagccagaggatgaggcagaatattactgtgttctatggtacagcaaccgctgggtgttcggtggaggaaccaaactgactgtccta

SEQ ID NO: 1890 - protein, 122 aa, Mus sp.
EVQLLESGGGLVQPGGSLKLSCAASGFDFSRSWMSWVRQAPGKGLEWIGEINPDSSTINYTPSLKDKFIISRDNAKNTLYLQMSKVRSEDTALYYCAGGYYRYPYYYTMDYWGQGTTVTVSS

SEQ ID NO: 1891 - protein, 5 aa, Mus sp.
RSWMS

SEQ ID NO: 1892 - protein, 17 aa, Mus sp.
EINPDSSTINYTPSLKD

SEQ ID NO: 1893 - protein, 13 aa, Mus sp.
GYYRYPYYYTMDY

SEQ ID NO: 1894 - DNA, 366 bp, Mus sp.
gaggtgcagctgctcgagtctggaggtggcctggtgcagcctggaggatccctgaaactctcctgtgcagcctcaggattcgattttagtagatcctggatgagttgggtccggcaggctccagggaaagggcttgaatggattggagaaattaatccagatagcagtacgataaactatacgccatctctaaaggataaattcatcatctccagagacaacgccaaaaatacgctgtacctgcaaatgagcaaagtgagatctgaggacacagccctttattactgtgcaggaggatactataggtacccatattactatactatggactactggggccaagggaccacggtcaccgtctcctca

SEQ ID NO: 1895 - protein, 107 aa, Mus sp.
ELQMTQSPASLSASVGETVTITCRASGNIHNYLAWYQQKQGKSPQLLVYNAKTLADGVPSRFSGSGSGTQYSLKINSLQPEDFGSYYCQHFWSTPYTFGGGTKLEIK

SEQ ID NO: 1896 - protein, 11 aa, Mus sp.
RASGNIHNYLA

SEQ ID NO: 1897 - protein, 7 aa, Mus sp.
NAKTLAD

SEQ ID NO: 1898 - protein, 9 aa, Mus sp.
QHFWSTPYT

SEQ ID NO: 1899 - DNA, 321 bp, Mus sp.
gagctccagatgacccagtctccagcctccctatctgcatctgtgggagaaactgtcaccatcacatgtcgagcaagtgggaatattcacaattatttggcatggtatcagcagaaacagggaaaatctcctcagctcctagtctataatgcaaaaaccttagcggatggtgtgccatcaaggttcagtggcagtggatcaggaacacaatattctctcaagatcaacagcctgcagcctgaagattttgggagttattactgtcaacatttttggagtactccgtacacgttcggaggggggaccaagcttgagatcaaa

SEQ ID NO: 1900 - protein, 244 aa, Mus sp.
EVQLLESGGGLVQPGGSLKLSCAASGFDFSRSWMSWVRQAPGKGLEWIGEINPDSSTINYTPSLKDKFIISRDNAKNTLYLQMSKVRSEDTALYYCAGGYYRYPYYYTMDYWGQGTTVTVSSGGGGSGGGGSGGGGSELQMTQSPASLSASVGETVTITCRASGNIHNYLAWYQQKQGKSPQLLVYNAKTLADGVPSRFSGSGSGTQYSLKINSLQPEDFGSYYCQHFWSTPYTFGGGTKLEIK

SEQ ID NO: 1901 - DNA, 732 bp, Mus sp.
gaggtgcagctgctcgagtctggaggtggcctggtgcagcctggaggatccctgaaactctcctgtgcagcctcaggattcgattttagtagatcctggatgagttgggtccggcaggctccagggaaagggcttgaatggattggagaaattaatccagatagcagtacgataaactatacgccatctctaaaggataaattcatcatctccagagacaacgccaaaaatacgctgtacctgcaaatgagcaaagtgagatctgaggacacagccctttattactgtgcaggaggatactataggtacccatattactatactatggactactggggccaagggaccacggtcaccgtctcctcaggtggtggtggttctggcggcggcggctccggtggtggtggttctgagctccagatgacccagtctccagcctccctatctgcatctgtgggagaaactgtcaccatcacatgtcgagcaagtgggaatattcacaattatttggcatggtatcagcagaaacagggaaaatctcctcagctcctagtctataatgcaaaaaccttagcggatggtgtgccatcaaggttcagtggcagtggatcaggaacacaatattctctcaagatcaacagcctgcagcctgaagattttgggagttattactgtcaacatttttggagtactccgtacacgttcggaggggggaccaagcttgagatcaaa

SEQ ID NO: 1902 - protein, 499 aa, Mus sp.
EVQLLESGGGLVQPGGSLKLSCAASGFDFSRSWMSWVRQAPGKGLEWIGEINPDSSTINYTPSLKDKFIISRDNAKNTLYLQMSKVRSEDTALYYCAGGYYRYPYYYTMDYWGQGTTVTVSSGGGGSGGGGSGGGGSELQMTQSPASLSASVGETVTITCRASGNIHNYLAWYQQKQGKSPQLLVYNAKTLADGVPSRFSGSGSGTQYSLKINSLQPEDFGSYYCQHFWSTPYTFGGGTKLEIKSGGGGSEVQLVESGGGLVQPGGSLKLSCAASGFTFNKYAMNWVRQAPGKGLEWVARIRSKYNNYATYYADSVKDRFTISRDDSKNTAYLQMNNLKTEDTAVYYCVRHGNFGNSYISYWAYWGQGTLVTVSSGGGGSGGGGSGGGGSQTVVTQEPSLTVSPGGTVTLTCGSSTGAVTSGNYPNWVQQKPGQAPRGLIGGTKFLAPGTPARFSGSLLGGKAALTLSGVQPEDEAEYYCVLWYSNRWVFGGGTKLTVL

SEQ ID NO: 1903 - DNA, 1497 bp, Mus sp.
gaggtgcagctgctcgagtctggaggtggcctggtgcagcctggaggatccctgaaactctcctgtgcagcctcaggattcgattttagtagatcctggatgagttgggtccggcaggctccagggaaagggcttgaatggattggagaaattaatccagatagcagtacgataaactatacgccatctctaaaggataaattcatcatctccagagacaacgccaaaaatacgctgtacctgcaaatgagcaaagtgagatctgaggacacagccctttattactgtgcaggaggatactataggtacccatattactatactatggactactggggccaagggaccacggtcaccgtctcctcaggtggtggtggttctggcggcggcggctccggtggtggtggttctgagctccagatgacccagtctccagcctccctatctgcatctgtgggagaaactgtcaccatcacatgtcgagcaagtgggaatattcacaattatttggcatggtatcagcagaaacagggaaaatctcctcagctcctagtctataatgcaaaaaccttagcggatggtgtgccatcaaggttcagtggcagtggatcaggaacacaatattctctcaagatcaacagcctgcagcctgaagattttgggagttattactgtcaacatttttggagtactccgtacacgttcggaggggggaccaagcttgagatcaaatccggaggtggtggatccgaggtgcagctggtcgagtctggaggaggattggtgcagcctggagggtcattgaaactctcatgtgcagcctctggattcaccttcaataagtacgccatgaactgggtccgccaggctccaggaaagggtttggaatgggttgctcgcataagaagtaaatataataattatgcaacatattatgccgattcagtgaaagacaggttcaccatctccagagatgattcaaaaaacactgcctatctacaaatgaacaacttgaaaactgaggacactgccgtgtactactgtgtgagacatgggaacttcggtaatagctacatatcctactgggcttactggggccaagggactctggtcaccgtctcctcaggtggtggtggttctggcggcggcggctccggtggtggtggttctcagactgttgtgactcaggaaccttcactcaccgtatcacctggtggaacagtcacactcacttgtggctcctcgactggggctgttacatctggcaactacccaaactgggtccaacaaaaaccaggtcaggcaccccgtggtctaataggtgggactaagttcctcgcccccggtactcctgccagattctcaggctccctgcttggaggcaaggctgccctcaccctctcaggggtacagccagaggatgaggcagaatattactgtgttctatggtacagcaaccgctgggtgttcggtggaggaaccaaactgactgtccta

SEQ ID NO: 1904 - protein, 122 aa, Mus sp.
EVQLLESGGGLVQPGGSLKLSCAASGFDFSTYWMSWVRQAPGKGLEWIGEINPDSSTINYTPSLKDKFIISRDNAKNTLYLQMNKVRSEDTALYYCAGGYYRYPYYYTMDYWGQGTTVTVSS

SEQ ID NO: 1905 - protein, 5 aa, Mus sp.
TYWMS

SEQ ID NO: 1906 - protein, 17 aa, Mus sp.
EINPDSSTINYTPSLKD

SEQ ID NO: 1907 - protein, 13 aa, Mus sp.
GYYRYPYYYTMDY

SEQ ID NO: 1908 - DNA, 366 bp, Mus sp.
gaggtgcagctgctcgagtctggaggtggcctggtgcagcctggaggatccctgaaactctcctgtgcagcctcaggattcgattttagtacatactggatgagttgggtccggcaggctccagggaaagggctagaatggattggagaaattaatccagatagcagtacgataaactatacgccatctctaaaggataaattcatcatctccagagacaacgccaaaaatacgctgtacctgcaaatgaacaaagtgagatctgaggacacagccctttattactgtgcaggaggatactataggtacccatattactatactatggactactggggccaagggaccacggtcaccgtctcctca

SEQ ID NO: 1909 - protein, 107 aa, Mus sp.; identical to SEQ ID NO: 1881

SEQ ID NO: 1910 - protein, 11 aa, Mus sp.
RASGNIHNYLA

SEQ ID NO: 1911 - protein, 7 aa, Mus sp.
NAKTLAD

SEQ ID NO: 1912 - protein, 9 aa, Mus sp.
QHFWSTPYT

SEQ ID NO: 1913 - DNA, 321 bp, Mus sp.
gagctcgtcatgacccagtctccagcctccctatctgcatctgtgggagaaactgtcaccatcacatgtcgagcaagtgggaatattcacaattatttagcatggtatcagcagaaacagggaaaatctcctcagctcctggtctataatgcaaaaaccttagcagatggtgtgccatcaaggttcagtggcagtggatcaggaacacaatattctctcaagatcaacagcctgcagcctgaagattttgggagttattactgtcaacatttttggagtactccgtacacgttcggaggggggaccaagcttgagatcaaa

SEQ ID NO: 1914 - protein, 244 aa, Mus sp.
EVQLLESGGGLVQPGGSLKLSCAASGFDFSTYWMSWVRQAPGKGLEWIGEINPDSSTINYTPSLKDKFIISRDNAKNTLYLQMNKVRSEDTALYYCAGGYYRYPYYYTMDYWGQGTTVTVSSGGGGSGGGGSGGGGSELVMTQSPASLSASVGETVTITCRASGNIHNYLAWYQQKQGKSPQLLVYNAKTLADGVPSRFSGSGSGTQYSLKINSLQPEDFGSYYCQHFWSTPYTFGGGTKLEIK

SEQ ID NO: 1915 - DNA, 732 bp, Mus sp.
gaggtgcagctgctcgagtctggaggtggcctggtgcagcctggaggatccctgaaactctcctgtgcagcctcaggattcgattttagtacatactggatgagttgggtccggcaggctccagggaaagggctagaatggattggagaaattaatccagatagcagtacgataaactatacgccatctctaaaggataaattcatcatctccagagacaacgccaaaaatacgctgtacctgcaaatgaacaaagtgagatctgaggacacagccctttattactgtgcaggaggatactataggtacccatattactatactatggactactggggccaagggaccacggtcaccgtctcctcaggtggtggtggttctggcggcggcggctccggtggtggtggttctgagctcgtcatgacccagtctccagcctccctatctgcatctgtgggagaaactgtcaccatcacatgtcgagcaagtgggaatattcacaattatttagcatggtatcagcagaaacagggaaaatctcctcagctcctggtctataatgcaaaaaccttagcagatggtgtgccatcaaggttcagtggcagtggatcaggaacacaatattctctcaagatcaacagcctgcagcctgaagattttgggagttattactgtcaacatttttggagtactccgtacacgttcggaggggggaccaagcttgagatcaaa

SEQ ID NO: 1916 - protein, 499 aa, Mus sp.
EVQLLESGGGLVQPGGSLKLSCAASGFDFSTYWMSWVRQAPGKGLEWIGEINPDSSTINYTPSLKDKFIISRDNAKNTLYLQMNKVRSEDTALYYCAGGYYRYPYYYTMDYWGQGTTVTVSSGGGGSGGGGSGGGGSELVMTQSPASLSASVGETVTITCRASGNIHNYLAWYQQKQGKSPQLLVYNAKTLADGVPSRFSGSGSGTQYSLKINSLQPEDFGSYYCQHFWSTPYTFGGGTKLEIKSGGGGSEVQLVESGGGLVQPGGSLKLSCAASGFTFNKYAMNWVRQAPGKGLEWVARIRSKYNNYATYYADSVKDRFTISRDDSKNTAYLQMNNLKTEDTAVYYCVRHGNFGNSYISYWAYWGQGTLVTVSSGGGGSGGGGSGGGGSQTVVTQEPSLTVSPGGTVTLTCGSSTGAVTSGNYPNWVQQKPGQAPRGLIGGTKFLAPGTPARFSGSLLGGKAALTLSGVQPEDEAEYYCVLWYSNRWVFGGGTKLTVL

SEQ ID NO: 1917 - DNA, 1497 bp, Mus sp.
gaggtgcagctgctcgagtctggaggtggcctggtgcagcctggaggatccctgaaactctcctgtgcagcctcaggattcgattttagtacatactggatgagttgggtccggcaggctccagggaaagggctagaatggattggagaaattaatccagatagcagtacgataaactatacgccatctctaaaggataaattcatcatctccagagacaacgccaaaaatacgctgtacctgcaaatgaacaaagtgagatctgaggacacagccctttattactgtgcaggaggatactataggtacccatattactatactatggactactggggccaagggaccacggtcaccgtctcctcaggtggtggtggttctggcggcggcggctccggtggtggtggttctgagctcgtcatgacccagtctccagcctccctatctgcatctgtgggagaaactgtcaccatcacatgtcgagcaagtgggaatattcacaattatttagcatggtatcagcagaaacagggaaaatctcctcagctcctggtctataatgcaaaaaccttagcagatggtgtgccatcaaggttcagtggcagtggatcaggaacacaatattctctcaagatcaacagcctgcagcctgaagattttgggagttattactgtcaacatttttggagtactccgtacacgttcggaggggggaccaagcttgagatcaaatccggaggtggtggatccgaggtgcagctggtcgagtctggaggaggattggtgcagcctggagggtcattgaaactctcatgtgcagcctctggattcaccttcaataagtacgccatgaactgggtccgccaggctccaggaaagggtttggaatgggttgctcgcataagaagtaaatataataattatgcaacatattatgccgattcagtgaaagacaggttcaccatctccagagatgattcaaaaaacactgcctatctacaaatgaacaacttgaaaactgaggacactgccgtgtactactgtgtgagacatgggaacttcggtaatagctacatatcctactgggcttactggggccaagggactctggtcaccgtctcctcaggtggtggtggttctggcggcggcggctccggtggtggtggttctcagactgttgtgactcaggaaccttcactcaccgtatcacctggtggaacagtcacactcacttgtggctcctcgactggggctgttacatctggcaactacccaaactgggtccaacaaaaaccaggtcaggcaccccgtggtctaataggtgggactaagttcctcgcccccggtactcctgccagattctcaggctccctgcttggaggcaaggctgccctcaccctctcaggggtacagccagaggatgaggcagaatattactgtgttctatggtacagcaaccgctgggtgttcggtggaggaaccaaactgactgtccta

SEQ ID NO: 1918 - protein, 122 aa, Mus sp.
EVQLLESGGGLVQPGGSLKLSCAASGFDFSTYWMSWVRQAPGKGLEWIGEINPDSSTINYTPSLKDKFIISRDNAKNTLYLQMTKVRPEDTALYYCAGGYYRYPYYYTMDYWGQGTTVTVSS

SEQ ID NO: 1919 - protein, 5 aa, Mus sp.
TYWMS

SEQ ID NO: 1920 - protein, 17 aa, Mus sp.
EINPDSSTINYTPSLKD

SEQ ID NO: 1921 - protein, 13 aa, Mus sp.
GYYRYPYYYTMDY

SEQ ID NO: 1922 - DNA, 366 bp, Mus sp.
gaggtgcagctgctcgagtctggaggtggcctggtgcagcctggaggatccctgaaactctcctgtgcagcctcaggattcgattttagtacatactggatgagttgggtccggcaggctccagggaaagggctagaatggattggagaaattaatccagatagcagtacgataaactatacgccatctctaaaggataaattcatcatctccagagacaacgccaaaaatacgctgtacctgcaaatgaccaaagtgagacctgaggacacagccctttattactgtgcaggaggatactataggtacccatattactatactatggactactggggccaagggaccacggtcaccgtctcctca

SEQ ID NO: 1923 - protein, 107 aa, Mus sp.
ELVMTQSPASLSASVGETVTITCRASGSIHNYLAWYQQKQGKSPQLLVYNAKTLADGVPSRFSGSGSGTQYSLKINSLQPEDFGSYYCQHFWSTPYTFGGGTKLEIK

SEQ ID NO: 1924 - protein, 11 aa, Mus sp.
RASGSIHNYLA

SEQ ID NO: 1925 - protein, 7 aa, Mus sp.
NAKTLAD

SEQ ID NO: 1926 - protein, 9 aa, Mus sp.
QHFWSTPYT

SEQ ID NO: 1927 - DNA, 321 bp, Mus sp.
gagctcgtcatgacccagtctccagcctccctatctgcatctgtgggagaaactgtcaccatcacatgtcgagcaagtgggagtattcacaattatttagcatggtatcagcagaaacagggaaaatctcctcagctcctggtctataatgcaaaaaccttagcagatggtgtgccatcaaggttcagtggcagtggatcaggaacacaatattctctcaagatcaacagcctgcagcctgaagattttgggagttattactgtcaacatttttggagtactccgtacacgttcggaggggggaccaagcttgagatcaaa

SEQ ID NO: 1928 - protein, 244 aa, Mus sp.
EVQLLESGGGLVQPGGSLKLSCAASGFDFSTYWMSWVRQAPGKGLEWIGEINPDSSTINYTPSLKDKFIISRDNAKNTLYLQMTKVRPEDTALYYCAGGYYRYPYYYTMDYWGQGTTVTVSSGGGGSGGGGSGGGGSELVMTQSPASLSASVGETVTITCRASGSIHNYLAWYQQKQGKSPQLLVYNAKTLADGVPSRFSGSGSGTQYSLKINSLQPEDFGSYYCQHFWSTPYTFGGGTKLEIK

SEQ ID NO: 1929 - DNA, 732 bp, Mus sp.
gaggtgcagctgctcgagtctggaggtggcctggtgcagcctggaggatccctgaaactctcctgtgcagcctcaggattcgattttagtacatactggatgagttgggtccggcaggctccagggaaagggctagaatggattggagaaattaatccagatagcagtacgataaactatacgccatctctaaaggataaattcatcatctccagagacaacgccaaaaatacgctgtacctgcaaatgaccaaagtgagacctgaggacacagccctttattactgtgcaggaggatactataggtacccatattactatactatggactactggggccaagggaccacggtcaccgtctcctcaggtggtggtggttctggcggcggcggctccggtggtggtggttctgagctcgtcatgacccagtctccagcctccctatctgcatctgtgggagaaactgtcaccatcacatgtcgagcaagtgggagtattcacaattatttagcatggtatcagcagaaacagggaaaatctcctcagctcctggtctataatgcaaaaaccttagcagatggtgtgccatcaaggttcagtggcagtggatcaggaacacaatattctctcaagatcaacagcctgcagcctgaagattttgggagttattactgtcaacatttttggagtactccgtacacgttcggaggggggaccaagcttgagatcaaa

SEQ ID NO: 1930 - protein, 499 aa, Mus sp.
EVQLLESGGGLVQPGGSLKLSCAASGFDFSTYWMSWVRQAPGKGLEWIGEINPDSSTINYTPSLKDKFIISRDNAKNTLYLQMTKVRPEDTALYYCAGGYYRYPYYYTMDYWGQGTTVTVSSGGGGSGGGGSGGGGSELVMTQSPASLSASVGETVTITCRASGSIHNYLAWYQQKQGKSPQLLVYNAKTLADGVPSRFSGSGSGTQYSLKINSLQPEDFGSYYCQHFWSTPYTFGGGTKLEIKSGGGGSEVQLVESGGGLVQPGGSLKLSCAASGFTFNKYAMNWVRQAPGKGLEWVARIRSKYNNYATYYADSVKDRFTISRDDSKNTAYLQMNNLKTEDTAVYYCVRHGNFGNSYISYWAYWGQGTLVTVSSGGGGSGGGGSGGGGSQTVVTQEPSLTVSPGGTVTLTCGSSTGAVTSGNYPNWVQQKPGQAPRGLIGGTKFLAPGTPARFSGSLLGGKAALTLSGVQPEDEAEYYCVLWYSNRWVFGGGTKLTVL

SEQ ID NO: 1931 - DNA, 1497 bp, Mus sp.
gaggtgcagctgctcgagtctggaggtggcctggtgcagcctggaggatccctgaaactctcctgtgcagcctcaggattcgattttagtacatactggatgagttgggtccggcaggctccagggaaagggctagaatggattggagaaattaatccagatagcagtacgataaactatacgccatctctaaaggataaattcatcatctccagagacaacgccaaaaatacgctgtacctgcaaatgaccaaagtgagacctgaggacacagccctttattactgtgcaggaggatactataggtacccatattactatactatggactactggggccaagggaccacggtcaccgtctcctcaggtggtggtggttctggcggcggcggctccggtggtggtggttctgagctcgtcatgacccagtctccagcctccctatctgcatctgtgggagaaactgtcaccatcacatgtcgagcaagtgggagtattcacaattatttagcatggtatcagcagaaacagggaaaatctcctcagctcctggtctataatgcaaaaaccttagcagatggtgtgccatcaaggttcagtggcagtggatcaggaacacaatattctctcaagatcaacagcctgcagcctgaagattttgggagttattactgtcaacatttttggagtactccgtacacgttcggaggggggaccaagcttgagatcaaatccggaggtggtggatccgaggtgcagctggtcgagtctggaggaggattggtgcagcctggagggtcattgaaactctcatgtgcagcctctggattcaccttcaataagtacgccatgaactgggtccgccaggctccaggaaagggtttggaatgggttgctcgcataagaagtaaatataataattatgcaacatattatgccgattcagtgaaagacaggttcaccatctccagagatgattcaaaaaacactgcctatctacaaatgaacaacttgaaaactgaggacactgccgtgtactactgtgtgagacatgggaacttcggtaatagctacatatcctactgggcttactggggccaagggactctggtcaccgtctcctcaggtggtggtggttctggcggcggcggctccggtggtggtggttctcagactgttgtgactcaggaaccttcactcaccgtatcacctggtggaacagtcacactcacttgtggctcctcgactggggctgttacatctggcaactacccaaactgggtccaacaaaaaccaggtcaggcaccccgtggtctaataggtgggactaagttcctcgcccccggtactcctgccagattctcaggctccctgcttggaggcaaggctgccctcaccctctcaggggtacagccagaggatgaggcagaatattactgtgttctatggtacagcaaccgctgggtgttcggtggaggaaccaaactgactgtccta

SEQ ID NO: 1932 - protein, 122 aa, Mus sp.; identical to SEQ ID NO: 1890

SEQ ID NO: 1933 - protein, 5 aa, Mus sp.
RSWMS

SEQ ID NO: 1934 - protein, 17 aa, Mus sp.
EINPDSSTINYTPSLKD

SEQ ID NO: 1935 - protein, 13 aa, Mus sp.
GYYRYPYYYTMDY

SEQ ID NO: 1936 - DNA, 366 bp, Mus sp.; identical to SEQ ID NO: 1894

SEQ ID NO: 1937 - protein, 107 aa, Mus sp.
ELQMTQSPASLSASVGETVTITCRASENIYSYLAWYQQKQGKSPQLLVYNAKTLAEGVPSRFSGSGSRTQYSLKINSLQPEDFGSYYCQHFWSTPYTFGGGTKLEIK

SEQ ID NO: 1938 - protein, 11 aa, Mus sp.
RASENIYSYLA

SEQ ID NO: 1939 - protein, 7 aa, Mus sp.
NAKTLAE

SEQ ID NO: 1940 - protein, 9 aa, Mus sp.
QHFWSTPYT

SEQ ID NO: 1941 - DNA, 321 bp, Mus sp.
gagctccagatgacccagtctccagcctccctatctgcatctgtgggagaaactgtcaccatcacatgtcgagcaagtgagaatatttacagttatttagcatggtatcagcagaaacagggaaaatctcctcagctcctggtctataatgcaaaaaccttagcagaaggtgtgccatcaaggttcagtggcagtggatcaagaacacaatattctctcaagatcaacagcctgcagcctgaagattttgggagttattactgtcaacatttttggagtactccgtacacgttcggaggggggaccaagcttgagatcaaa

SEQ ID NO: 1942 - protein, 244 aa, Mus sp.
EVQLLESGGGLVQPGGSLKLSCAASGFDFSRSWMSWVRQAPGKGLEWIGEINPDSSTINYTPSLKDKFIISRDNAKNTLYLQMSKVRSEDTALYYCAGGYYRYPYYYTMDYWGQGTTVTVSSGGGGSGGGGSGGGGSELQMTQSPASLSASVGETVTITCRASENIYSYLAWYQQKQGKSPQLLVYNAKTLAEGVPSRFSGSGSRTQYSLKINSLQPEDFGSYYCQHFWSTPYTFGGGTKLEIK

SEQ ID NO: 1943 - DNA, 732 bp, Mus sp.
gaggtgcagctgctcgagtctggaggtggcctggtgcagcctggaggatccctgaaactctcctgtgcagcctcaggattcgattttagtagatcctggatgagttgggtccggcaggctccagggaaagggcttgaatggattggagaaattaatccagatagcagtacgataaactatacgccatctctaaaggataaattcatcatctccagagacaacgccaaaaatacgctgtacctgcaaatgagcaaagtgagatctgaggacacagccctttattactgtgcaggaggatactataggtacccatattactatactatggactactggggccaagggaccacggtcaccgtctcctcaggtggtggtggttctggcggcggcggctccggtggtggtggttctgagctccagatgacccagtctccagcctccctatctgcatctgtgggagaaactgtcaccatcacatgtcgagcaagtgagaatatttacagttatttagcatggtatcagcagaaacagggaaaatctcctcagctcctggtctataatgcaaaaaccttagcagaaggtgtgccatcaaggttcagtggcagtggatcaagaacacaatattctctcaagatcaacagcctgcagcctgaagattttgggagttattactgtcaacatttttggagtactccgtacacgttcggaggggggaccaagcttgagatcaaa

SEQ ID NO: 1944 - protein, 499 aa, Mus sp.
EVQLLESGGGLVQPGGSLKLSCAASGFDFSRSWMSWVRQAPGKGLEWIGEINPDSSTINYTPSLKDKFIISRDNAKNTLYLQMSKVRSEDTALYYCAGGYYRYPYYYTMDYWGQGTTVTVSSGGGGSGGGGSGGGGSELQMTQSPASLSASVGETVTITCRASENIYSYLAWYQQKQGKSPQLLVYNAKTLAEGVPSRFSGSGSRTQYSLKINSLQPEDFGSYYCQHFWSTPYTFGGGTKLEIKSGGGGSEVQLVESGGGLVQPGGSLKLSCAASGFTFNKYAMNWVRQAPGKGLEWVARIRSKYNNYATYYADSVKDRFTISRDDSKNTAYLQMNNLKTEDTAVYYCVRHGNFGNSYISYWAYWGQGTLVTVSSGGGGSGGGGSGGGGSQTVVTQEPSLTVSPGGTVTLTCGSSTGAVTSGNYPNWVQQKPGQAPRGLIGGTKFLAPGTPARFSGSLLGGKAALTLSGVQPEDEAEYYCVLWYSNRWVFGGGTKLTVL

SEQ ID NO: 1945 - DNA, 1497 bp, Mus sp.
gaggtgcagctgctcgagtctggaggtggcctggtgcagcctggaggatccctgaaactctcctgtgcagcctcaggattcgattttagtagatcctggatgagttgggtccggcaggctccagggaaagggcttgaatggattggagaaattaatccagatagcagtacgataaactatacgccatctctaaaggataaattcatcatctccagagacaacgccaaaaatacgctgtacctgcaaatgagcaaagtgagatctgaggacacagccctttattactgtgcaggaggatactataggtacccatattactatactatggactactggggccaagggaccacggtcaccgtctcctcaggtggtggtggttctggcggcggcggctccggtggtggtggttctgagctccagatgacccagtctccagcctccctatctgcatctgtgggagaaactgtcaccatcacatgtcgagcaagtgagaatatttacagttatttagcatggtatcagcagaaacagggaaaatctcctcagctcctggtctataatgcaaaaaccttagcagaaggtgtgccatcaaggttcagtggcagtggatcaagaacacaatattctctcaagatcaacagcctgcagcctgaagattttgggagttattactgtcaacatttttggagtactccgtacacgttcggaggggggaccaagcttgagatcaaatccggaggtggtggatccgaggtgcagctggtcgagtctggaggaggattggtgcagcctggagggtcattgaaactctcatgtgcagcctctggattcaccttcaataagtacgccatgaactgggtccgccaggctccaggaaagggtttggaatgggttgctcgcataagaagtaaatataataattatgcaacatattatgccgattcagtgaaagacaggttcaccatctccagagatgattcaaaaaacactgcctatctacaaatgaacaacttgaaaactgaggacactgccgtgtactactgtgtgagacatgggaacttcggtaatagctacatatcctactgggcttactggggccaagggactctggtcaccgtctcctcaggtggtggtggttctggcggcggcggctccggtggtggtggttctcagactgttgtgactcaggaaccttcactcaccgtatcacctggtggaacagtcacactcacttgtggctcctcgactggggctgttacatctggcaactacccaaactgggtccaacaaaaaccaggtcaggcaccccgtggtctaataggtgggactaagttcctcgcccccggtactcctgccagattctcaggctccctgcttggaggcaaggctgccctcaccctctcaggggtacagccagaggatgaggcagaatattactgtgttctatggtacagcaaccgctgggtgttcggtggaggaaccaaactgactgtccta

SEQ ID NO: 1946 - protein, 122 aa, Mus sp.
EVQLLESGGGLVQPGGSLKLSCAASGFDFSTYWMSWVRQAPGKGLEWIGEINPDSSTINYTPSLKDKFIISRDNAKNTLYLQMNKVRSDDTALYYCAGGYYRYPYYYTMDYWGQGTTVTVSS

SEQ ID NO: 1947 - protein, 5 aa, Mus sp.
TYWMS

SEQ ID NO: 1948 - protein, 17 aa, Mus sp.
EINPDSSTINYTPSLKD

SEQ ID NO: 1949 - protein, 13 aa, Mus sp.
GYYRYPYYYTMDY

SEQ ID NO: 1950 - DNA, 366 bp, Mus sp.
gaggtgcagctgctcgagtctggaggtggcctggtgcagcctggaggatccctgaaactctcctgtgcagcctcaggattcgattttagtacatactggatgagttgggtccggcaggctccagggaaagggctagaatggattggagaaattaatccagatagcagtacgataaactatacgccatctctaaaggataaattcatcatctccagagacaacgccaaaaatacgctgtacctgcaaatgaacaaagtgagatctgacgacacagccctttattactgtgcaggaggatactataggtacccatattactatactatggactactggggccaagggaccacggtcaccgtctcctca

SEQ ID NO: 1951 - protein, 107 aa, Mus sp.
ELVMTQSPSSLSASVGETVTITCRASGNIHNYLAWYQQKQGKSPQLLVYNAKTLADGVPSRFSGSGSGTQYSLKINSLQPEDFGSYYCQHFWSTPYTFGGGTKLEIK

SEQ ID NO: 1952 - protein, 11 aa, Mus sp.
RASGNIHNYLA

SEQ ID NO: 1953 - protein, 7 aa, Mus sp.
NAKTLAD

SEQ ID NO: 1954 - protein, 9 aa, Mus sp.
QHFWSTPYT

SEQ ID NO: 1955 - DNA, 321 bp, Mus sp.
gagctcgtgatgacacagtctccatcctccttatctgcatctgtgggagaaactgtcaccatcacatgtcgagcaagtgggaatattcacaattatttagcatggtatcagcagaaacagggaaaatctcctcagctcctggtctataatgcaaaaaccttagcagatggtgtgccatcaaggttcagtggcagtggatcaggaacacaatattctctcaagatcaacagcctgcagcctgaagattttgggagttattactgtcaacatttttggagtactccgtacacgttcggaggggggaccaagcttgagatcaaa

SEQ ID NO: 1956 - protein, 244 aa, Mus sp.
EVQLLESGGGLVQPGGSLKLSCAASGFDFSTYWMSWVRQAPGKGLEWIGEINPDSSTINYTPSLKDKFIISRDNAKNTLYLQMNKVRSDDTALYYCAGGYYRYPYYYTMDYWGQGTTVTVSSGGGGSGGGGSGGGGSELVMTQSPSSLSASVGETVTITCRASGNIHNYLAWYQQKQGKSPQLLVYNAKTLADGVPSRFSGSGSGTQYSLKINSLQPEDFGSYYCQHFWSTPYTFGGGTKLEIK

SEQ ID NO: 1957 - DNA, 732 bp, Mus sp.
gaggtgcagctgctcgagtctggaggtggcctggtgcagcctggaggatccctgaaactctcctgtgcagcctcaggattcgattttagtacatactggatgagttgggtccggcaggctccagggaaagggctagaatggattggagaaattaatccagatagcagtacgataaactatacgccatctctaaaggataaattcatcatctccagagacaacgccaaaaatacgctgtacctgcaaatgaacaaagtgagatctgacgacacagccctttattactgtgcaggaggatactataggtacccatattactatactatggactactggggccaagggaccacggtcaccgtctcctcaggtggtggtggttctggcggcggcggctccggtggtggtggttctgagctcgtgatgacacagtctccatcctccttatctgcatctgtgggagaaactgtcaccatcacatgtcgagcaagtgggaatattcacaattatttagcatggtatcagcagaaacagggaaaatctcctcagctcctggtctataatgcaaaaaccttagcagatggtgtgccatcaaggttcagtggcagtggatcaggaacacaatattctctcaagatcaacagcctgcagcctgaagattttgggagttattactgtcaacatttttggagtactccgtacacgttcggaggggggaccaagcttgagatcaaa

SEQ ID NO: 1958 - protein, 499 aa, Mus sp.
EVQLLESGGGLVQPGGSLKLSCAASGFDFSTYWMSWVRQAPGKGLEWIGEINPDSSTINYTPSLKDKFIISRDNAKNTLYLQMNKVRSDDTALYYCAGGYYRYPYYYTMDYWGQGTTVTVSSGGGGSGGGGSGGGGSELVMTQSPSSLSASVGETVTITCRASGNIHNYLAWYQQKQGKSPQLLVYNAKTLADGVPSRFSGSGSGTQYSLKINSLQPEDFGSYYCQHFWSTPYTFGGGTKLEIKSGGGGSEVQLVESGGGLVQPGGSLKLSCAASGFTFNKYAMNWVRQAPGKGLEWVARIRSKYNNYATYYADSVKDRFTISRDDSKNTAYLQMNNLKTEDTAVYYCVRHGNFGNSYISYWAYWGQGTLVTVSSGGGGSGGGGSGGGGSQTVVTQEPSLTVSPGGTVTLTCGSSTGAVTSGNYPNWVQQKPGQAPRGLIGGTKFLAPGTPARFSGSLLGGKAALTLSGVQPEDEAEYYCVLWYSNRWVFGGGTKLTVL

SEQ ID NO: 1959 - DNA, 1497 bp, Mus sp.
gaggtgcagctgctcgagtctggaggtggcctggtgcagcctggaggatccctgaaactctcctgtgcagcctcaggattcgattttagtacatactggatgagttgggtccggcaggctccagggaaagggctagaatggattggagaaattaatccagatagcagtacgataaactatacgccatctctaaaggataaattcatcatctccagagacaacgccaaaaatacgctgtacctgcaaatgaacaaagtgagatctgacgacacagccctttattactgtgcaggaggatactataggtacccatattactatactatggactactggggccaagggaccacggtcaccgtctcctcaggtggtggtggttctggcggcggcggctccggtggtggtggttctgagctcgtgatgacacagtctccatcctccttatctgcatctgtgggagaaactgtcaccatcacatgtcgagcaagtgggaatattcacaattatttagcatggtatcagcagaaacagggaaaatctcctcagctcctggtctataatgcaaaaaccttagcagatggtgtgccatcaaggttcagtggcagtggatcaggaacacaatattctctcaagatcaacagcctgcagcctgaagattttgggagttattactgtcaacatttttggagtactccgtacacgttcggaggggggaccaagcttgagatcaaatccggaggtggtggatccgaggtgcagctggtcgagtctggaggaggattggtgcagcctggagggtcattgaaactctcatgtgcagcctctggattcaccttcaataagtacgccatgaactgggtccgccaggctccaggaaagggtttggaatgggttgctcgcataagaagtaaatataataattatgcaacatattatgccgattcagtgaaagacaggttcaccatctccagagatgattcaaaaaacactgcctatctacaaatgaacaacttgaaaactgaggacactgccgtgtactactgtgtgagacatgggaacttcggtaatagctacatatcctactgggcttactggggccaagggactctggtcaccgtctcctcaggtggtggtggttctggcggcggcggctccggtggtggtggttctcagactgttgtgactcaggaaccttcactcaccgtatcacctggtggaacagtcacactcacttgtggctcctcgactggggctgttacatctggcaactacccaaactgggtccaacaaaaaccaggtcaggcaccccgtggtctaataggtgggactaagttcctcgcccccggtactcctgccagattctcaggctccctgcttggaggcaaggctgccctcaccctctcaggggtacagccagaggatgaggcagaatattactgtgttctatggtacagcaaccgctgggtgttcggtggaggaaccaaactgactgtccta

SEQ ID NO: 1960 - protein, 122 aa, Mus sp.
EVQLLESGGGLVQPGGSLNLSCAASGFDFSTYWMSWVRQAPGKGLEWIGEINPDSSTINYTPSLKDKFIISRDNAKNTLYLQMNKVRSDDTALYYCAGGYYRYPYYYTMDYWGQGTTVTVSS

SEQ ID NO: 1961 - protein, 5 aa, Mus sp.
TYWMS

SEQ ID NO: 1962 - protein, 17 aa, Mus sp.
EINPDSSTINYTPSLKD

SEQ ID NO: 1963 - protein, 13 aa, Mus sp.
GYYRYPYYYTMDY

SEQ ID NO: 1964 - DNA, 366 bp, Mus sp.
gaggtgcagctgctcgagtctggaggtggcctggtgcagcctggaggatccctgaatctctcctgtgcagcctcaggattcgattttagtacatactggatgagttgggtccggcaggctccagggaaagggctagaatggattggagaaattaatccagatagcagtacgataaactatacgccatctctaaaggataaattcatcatctccagagacaacgccaaaaatacgctgtacctgcaaatgaacaaagtgagatctgacgacacagccctttattactgtgcaggaggatactataggtacccatattactatactatggactactggggccaagggaccacggtcaccgtctcctca

SEQ ID NO: 1965 - protein, 107 aa, Mus sp.; identical to SEQ ID NO: 1895

SEQ ID NO: 1966 - protein, 11 aa, Mus sp.
RASGNIHNYLA

SEQ ID NO: 1967 - protein, 7 aa, Mus sp.
NAKTLAD

SEQ ID NO: 1968 - protein, 9 aa, Mus sp.
QHFWSTPYT

SEQ ID NO: 1969 - DNA, 321 bp, Mus sp.
gagctccagatgacccagtctccagcctccctatctgcatctgtgggagaaactgtcaccatcacatgtcgagcaagtgggaatattcacaattatttagcatggtatcagcagaaacagggaaaatctcctcagctcctggtctataatgcaaaaaccttagcagatggtgtgccatcaaggttcagtggcagtggatcaggaacacaatattctctcaagatcaacagcctgcagcctgaagattttgggagttattactgtcaacatttttggagtactccgtacacgttcggaggggggaccaagcttgagatcaaa

SEQ ID NO: 1970 - protein, 244 aa, Mus sp.
EVQLLESGGGLVQPGGSLNLSCAASGFDFSTYWMSWVRQAPGKGLEWIGEINPDSSTINYTPSLKDKFIISRDNAKNTLYLQMNKVRSDDTALYYCAGGYYRYPYYYTMDYWGQGTTVTVSSGGGGSGGGGSGGGGSELQMTQSPASLSASVGETVTITCRASGNIHNYLAWYQQKQGKSPQLLVYNAKTLADGVPSRFSGSGSGTQYSLKINSLQPEDFGSYYCQHFWSTPYTFGGGTKLEIK

SEQ ID NO: 1971 - DNA, 732 bp, Mus sp.
gaggtgcagctgctcgagtctggaggtggcctggtgcagcctggaggatccctgaatctctcctgtgcagcctcaggattcgattttagtacatactggatgagttgggtccggcaggctccagggaaagggctagaatggattggagaaattaatccagatagcagtacgataaactatacgccatctctaaaggataaattcatcatctccagagacaacgccaaaaatacgctgtacctgcaaatgaacaaagtgagatctgacgacacagccctttattactgtgcaggaggatactataggtacccatattactatactatggactactggggccaagggaccacggtcaccgtctcctcaggtggtggtggttctggcggcggcggctccggtggtggtggttctgagctccagatgacccagtctccagcctccctatctgcatctgtgggagaaactgtcaccatcacatgtcgagcaagtgggaatattcacaattatttagcatggtatcagcagaaacagggaaaatctcctcagctcctggtctataatgcaaaaaccttagcagatggtgtgccatcaaggttcagtggcagtggatcaggaacacaatattctctcaagatcaacagcctgcagcctgaagattttgggagttattactgtcaacatttttggagtactccgtacacgttcggaggggggaccaagcttgagatcaaa

SEQ ID NO: 1972 - protein, 499 aa, Mus sp.
EVQLLESGGGLVQPGGSLNLSCAASGFDFSTYWMSWVRQAPGKGLEWIGEINPDSSTINYTPSLKDKFIISRDNAKNTLYLQMNKVRSDDTALYYCAGGYYRYPYYYTMDYWGQGTTVTVSSGGGGSGGGGSGGGGSELQMTQSPASLSASVGETVTITCRASGNIHNYLAWYQQKQGKSPQLLVYNAKTLADGVPSRFSGSGSGTQYSLKINSLQPEDFGSYYCQHFWSTPYTFGGGTKLEIKSGGGGSEVQLVESGGGLVQPGGSLKLSCAASGFTFNKYAMNWVRQAPGKGLEWVARIRSKYNNYATYYADSVKDRFTISRDDSKNTAYLQMNNLKTEDTAVYYCVRHGNFGNSYISYWAYWGQGTLVTVSSGGGGSGGGGSGGGGSQTVVTQEPSLTVSPGGTVTLTCGSSTGAVTSGNYPNWVQQKPGQAPRGLIGGTKFLAPGTPARFSGSLLGGKAALTLSGVQPEDEAEYYCVLWYSNRWVFGGGTKLTVL

SEQ ID NO: 1973 - DNA, 1497 bp, Mus sp.
gaggtgcagctgctcgagtctggaggtggcctggtgcagcctggaggatccctgaatctctcctgtgcagcctcaggattcgattttagtacatactggatgagttgggtccggcaggctccagggaaagggctagaatggattggagaaattaatccagatagcagtacgataaactatacgccatctctaaaggataaattcatcatctccagagacaacgccaaaaatacgctgtacctgcaaatgaacaaagtgagatctgacgacacagccctttattactgtgcaggaggatactataggtacccatattactatactatggactactggggccaagggaccacggtcaccgtctcctcaggtggtggtggttctggcggcggcggctccggtggtggtggttctgagctccagatgacccagtctccagcctccctatctgcatctgtgggagaaactgtcaccatcacatgtcgagcaagtgggaatattcacaattatttagcatggtatcagcagaaacagggaaaatctcctcagctcctggtctataatgcaaaaaccttagcagatggtgtgccatcaaggttcagtggcagtggatcaggaacacaatattctctcaagatcaacagcctgcagcctgaagattttgggagttattactgtcaacatttttggagtactccgtacacgttcggaggggggaccaagcttgagatcaaatccggaggtggtggatccgaggtgcagctggtcgagtctggaggaggattggtgcagcctggagggtcattgaaactctcatgtgcagcctctggattcaccttcaataagtacgccatgaactgggtccgccaggctccaggaaagggtttggaatgggttgctcgcataagaagtaaatataataattatgcaacatattatgccgattcagtgaaagacaggttcaccatctccagagatgattcaaaaaacactgcctatctacaaatgaacaacttgaaaactgaggacactgccgtgtactactgtgtgagacatgggaacttcggtaatagctacatatcctactgggcttactggggccaagggactctggtcaccgtctcctcaggtggtggtggttctggcggcggcggctccggtggtggtggttctcagactgttgtgactcaggaaccttcactcaccgtatcacctggtggaacagtcacactcacttgtggctcctcgactggggctgttacatctggcaactacccaaactgggtccaacaaaaaccaggtcaggcaccccgtggtctaataggtgggactaagttcctcgcccccggtactcctgccagattctcaggctccctgcttggaggcaaggctgccctcaccctctcaggggtacagccagaggatgaggcagaatattactgtgttctatggtacagcaaccgctgggtgttcggtggaggaaccaaactgactgtccta

SEQ ID NO: 1974 - protein, 122 aa, Mus sp.
EVQLLESGGGLVQPGGSLKLSCAASGFDFSTYWMSWVRQAPGKGLEWIGEINPDSSTVNYTPSLKDKFIISRDNAKNTLYLQMTKVRSEDTALYYCAGGYYRYPYYYTMDYWGQGTTVTVSS

SEQ ID NO: 1975 - protein, 5 aa, Mus sp.
TYWMS

SEQ ID NO: 1976 - protein, 17 aa, Mus sp.
EINPDSSTVNYTPSLKD

SEQ ID NO: 1977 - protein, 13 aa, Mus sp.
GYYRYPYYYTMDY

SEQ ID NO: 1978 - DNA, 366 bp, Mus sp.
gaggtgcagctgctcgagtctggaggtggcctggtgcagcctggaggatccctgaaactctcctgtgcagcctcaggattcgattttagtacatactggatgagttgggtccggcaggctccagggaaagggctagaatggattggagaaattaatccagatagcagtacggtaaactatacgccatctctaaaggataaattcatcatctccagagacaacgccaaaaatacgctgtacctgcaaatgaccaaagtgagatctgaggacacagccctttattactgtgcaggaggatactataggtacccatattactatactatggactactggggccaagggaccacggtcaccgtctcctca

SEQ ID NO: 1979 - protein, 107 aa, Mus sp.; identical to SEQ ID NO: 1895

SEQ ID NO: 1980 - protein, 11 aa, Mus sp.
RASGNIHNYLA

SEQ ID NO: 1981 - protein, 7 aa, Mus sp.
NAKTLAD

SEQ ID NO: 1982 - protein, 9 aa, Mus sp.
QHFWSTPYT

SEQ ID NO: 1983 - DNA, 321 bp, Mus sp.; identical to SEQ ID NO: 1969

SEQ ID NO: 1984 - protein, 244 aa, Mus sp.
EVQLLESGGGLVQPGGSLKLSCAASGFDFSTYWMSWVRQAPGKGLEWIGEINPDSSTVNYTPSLKDKFIISRDNAKNTLYLQMTKVRSEDTALYYCAGGYYRYPYYYTMDYWGQGTTVTVSSGGGGSGGGGSGGGGSELQMTQSPASLSASVGETVTITCRASGNIHNYLAWYQQKQGKSPQLLVYNAKTLADGVPSRFSGSGSGTQYSLKINSLQPEDFGSYYCQHFWSTPYTFGGGTKLEIK

SEQ ID NO: 1985 - DNA, 732 bp, Mus sp.
gaggtgcagctgctcgagtctggaggtggcctggtgcagcctggaggatccctgaaactctcctgtgcagcctcaggattcgattttagtacatactggatgagttgggtccggcaggctccagggaaagggctagaatggattggagaaattaatccagatagcagtacggtaaactatacgccatctctaaaggataaattcatcatctccagagacaacgccaaaaatacgctgtacctgcaaatgaccaaagtgagatctgaggacacagccctttattactgtgcaggaggatactataggtacccatattactatactatggactactggggccaagggaccacggtcaccgtctcctcaggtggtggtggttctggcggcggcggctccggtggtggtggttctgagctccagatgacccagtctccagcctccctatctgcatctgtgggagaaactgtcaccatcacatgtcgagcaagtgggaatattcacaattatttagcatggtatcagcagaaacagggaaaatctcctcagctcctggtctataatgcaaaaaccttagcagatggtgtgccatcaaggttcagtggcagtggatcaggaacacaatattctctcaagatcaacagcctgcagcctgaagattttgggagttattactgtcaacatttttggagtactccgtacacgttcggaggggggaccaagcttgagatcaaa

SEQ ID NO: 1986 - protein, 499 aa, Mus sp.
EVQLLESGGGLVQPGGSLKLSCAASGFDFSTYWMSWVRQAPGKGLEWIGEINPDSSTVNYTPSLKDKFIISRDNAKNTLYLQMTKVRSEDTALYYCAGGYYRYPYYYTMDYWGQGTTVTVSSGGGGSGGGGSGGGGSELQMTQSPASLSASVGETVTITCRASGNIHNYLAWYQQKQGKSPQLLVYNAKTLADGVPSRFSGSGSGTQYSLKINSLQPEDFGSYYCQHFWSTPYTFGGGTKLEIKSGGGGSEVQLVESGGGLVQPGGSLKLSCAASGFTFNKYAMNWVRQAPGKGLEWVARIRSKYNNYATYYADSVKDRFTISRDDSKNTAYLQMNNLKTEDTAVYYCVRHGNFGNSYISYWAYWGQGTLVTVSSGGGGSGGGGSGGGGSQTVVTQEPSLTVSPGGTVTLTCGSSTGAVTSGNYPNWVQQKPGQAPRGLIGGTKFLAPGTPARFSGSLLGGKAALTLSGVQPEDEAEYYCVLWYSNRWVFGGGTKLTVL

SEQ ID NO: 1987 - DNA, 1497 bp, Mus sp.
gaggtgcagctgctcgagtctggaggtggcctggtgcagcctggaggatccctgaaactctcctgtgcagcctcaggattcgattttagtacatactggatgagttgggtccggcaggctccagggaaagggctagaatggattggagaaattaatccagatagcagtacggtaaactatacgccatctctaaaggataaattcatcatctccagagacaacgccaaaaatacgctgtacctgcaaatgaccaaagtgagatctgaggacacagccctttattactgtgcaggaggatactataggtacccatattactatactatggactactggggccaagggaccacggtcaccgtctcctcaggtggtggtggttctggcggcggcggctccggtggtggtggttctgagctccagatgacccagtctccagcctccctatctgcatctgtgggagaaactgtcaccatcacatgtcgagcaagtgggaatattcacaattatttagcatggtatcagcagaaacagggaaaatctcctcagctcctggtctataatgcaaaaaccttagcagatggtgtgccatcaaggttcagtggcagtggatcaggaacacaatattctctcaagatcaacagcctgcagcctgaagattttgggagttattactgtcaacatttttggagtactccgtacacgttcggaggggggaccaagcttgagatcaaatccggaggtggtggatccgaggtgcagctggtcgagtctggaggaggattggtgcagcctggagggtcattgaaactctcatgtgcagcctctggattcaccttcaataagtacgccatgaactgggtccgccaggctccaggaaagggtttggaatgggttgctcgcataagaagtaaatataataattatgcaacatattatgccgattcagtgaaagacaggttcaccatctccagagatgattcaaaaaacactgcctatctacaaatgaacaacttgaaaactgaggacactgccgtgtactactgtgtgagacatgggaacttcggtaatagctacatatcctactgggcttactggggccaagggactctggtcaccgtctcctcaggtggtggtggttctggcggcggcggctccggtggtggtggttctcagactgttgtgactcaggaaccttcactcaccgtatcacctggtggaacagtcacactcacttgtggctcctcgactggggctgttacatctggcaactacccaaactgggtccaacaaaaaccaggtcaggcaccccgtggtctaataggtgggactaagttcctcgcccccggtactcctgccagattctcaggctccctgcttggaggcaaggctgccctcaccctctcaggggtacagccagaggatgaggcagaatattactgtgttctatggtacagcaaccgctgggtgttcggtggaggaaccaaactgactgtccta

SEQ ID NO: 1988 - DNA, 4104 bp, Artificial Sequence
  human IGF-R1 construct
atgaagtctggctccggcggagggtccccgacctcgctgtgggggctcctgtttctctccgccgcgctctcgctctggccgacgagtggagaaatctgcgggccaggcatcgacatccgcaacgactatcagcagctgaagcgcctggagaactgcacggtgatcgagggctacctccacatcctgctcatctccaaggccgaggactaccgcagctaccgcttccccaagctcacggtcattaccgagtacttgctgctgttccgagtggctggcctcgagagcctcggagacctcttccccaacctcacggtcatccgcggctggaaactcttctacaactacgccctggtcatcttcgagatgaccaatctcaaggatattgggctttacaacctgaggaacattactcggggggccatcaggattgagaaaaatgctgacctctgttacctctccactgtggactggtccctgatcctggatgcggtgtccaataactacattgtggggaataagcccccaaaggaatgtggggacctgtgtccagggaccatggaggagaagccgatgtgtgagaagaccaccatcaacaatgagtacaactaccgctgctggaccacaaaccgctgccagaaaatgtgcccaagcacgtgtgggaagcgggcgtgcaccgagaacaatgagtgctgccaccccgagtgcctgggcagctgcagcgcgcctgacaacgacacggcctgtgtagcttgccgccactactactatgccggtgtctgtgtgcctgcctgcccgcccaacacctacaggtttgagggctggcgctgtgtggaccgtgacttctgcgccaacatcctcagcgccgagagcagcgactccgaggggtttgtgatccacgacggcgagtgcatgcaggagtgcccctcgggcttcatccgcaacggcagccagagcatgtactgcatcccttgtgaaggtccttgcccgaaggtctgtgaggaagaaaagaaaacaaagaccattgattctgttacttctgctcagatgctccaaggatgcaccatcttcaagggcaatttgctcattaacatccgacgggggaataacattgcttcagagctggagaacttcatggggctcatcgaggtggtgacgggctacgtgaagatccgccattctcatgccttggtctccttgtccttcctaaaaaaccttcgcctcatcctaggagaggagcagctagaagggaattactccttctacgtcctcgacaaccagaacttgcagcaactgtgggactgggaccaccgcaacctgaccatcaaagcagggaaaatgtactttgctttcaatcccaaattatgtgtttccgaaatttaccgcatggaggaagtgacggggactaaagggcgccaaagcaaaggggacataaacaccaggaacaacggggagagagcctcctgtgaaagtgacgtcctgcatttcacctccaccaccacgtcgaagaatcgcatcatcataacctggcaccggtaccggccccctgactacagggatctcatcagcttcaccgtttactacaaggaagcaccctttaagaatgtcacagagtatgatgggcaggatgcctgcggctccaacagctggaacatggtggacgtggacctcccgcccaacaaggacgtggagcccggcatcttactacatgggctgaagccctggactcagtacgccgtttacgtcaaggctgtgaccctcaccatggtggagaacgaccatatccgtggggccaagagtgagatcttgtacattcgcaccaatgcttcagttccttccattcccttggacgttctttcagcatcgaactcctcttctcagttaatcgtgaagtggaaccctccctctctgcccaacggcaacctgagttactacattgtgcgctggcagcggcagcctcaggacggctacctttaccggcacaattactgctccaaagacaaaatccccatcaggaagtatgccgacggcaccatcgacattgaggaggtcacagagaaccccaagactgaggtgtgtggtggggagaaagggccttgctgcgcctgccccaaaactgaagccgagaagcaggccgagaaggaggaggctgaataccgcaaagtctttgagaatttcctgcacaactccatcttcgtgcccagacctgaaaggaagcggagagatgtcatgcaagtggccaacaccaccatgtccagccgaagcaggaacaccacggccgcagacacctacaacatcaccgacccggaagagctggagacagagtaccctttctttgagagcagagtggataacaaggagagaactgtcatttctaaccttcggcctttcacattgtaccgcatcgatatccacagctgcaaccacgaggctgagaagctgggctgcagcgcctccaacttcgtctttgcaaggactatgcccgcagaaggagcagatgacattcctgggccagtgacctgggagccaaggcctgaaaactccatctttttaaagtggccggaacctgagaatcccaatggattgattctaatgtatgaaataaaatacggatcacaagttgaggatcagcgagaatgtgtgtccagacaggaatacaggaagtatggaggggccaagctaaaccggctaaacccggggaactacacagcccggattcaggccacatctctctctgggaatgggtcgtggacagatcctgtgttcttctatgtccaggccaaaacaggatatgaaaacttcatccatctgatcatcgctctgcccgtcgctgtcctgttgatcgtgggagggttggtgattatgctgtacgtcttccatagaaagagaaataacagcaggctggggaatggagtgctgtatgcctctgtgaacccggagtacttcagcgctgctgatgtgtacgttcctgatgagtgggaggtggctcgggagaagatcaccatgagccgggaacttgggcaggggtcgtttgggatggtctatgaaggagttgccaagggtgtggtgaaagatgaacctgaaaccagagtggccattaaaacagtgaacgaggccgcaagcatgcgtgagaggattgagtttctcaacgaagcttctgtgatgaaggagttcaattgtcaccatgtggtgcgattgctgggtgtggtgtcccaaggccagccaacactggtcatcatggaactgatgacacggggcgatctcaaaagttatctccggtctctgaggccagaaatggagaataatccagtcctagcacctccaagcctgagcaagatgattcagatggccggagagattgcagacggcatggcatacctcaacgccaataagttcgtccacagagaccttgctgcccggaattgcatggtagccgaagatttcacagtcaaaatcggagattttggtatgacgcgagatatctatgagacagactattaccggaaaggagggaaagggctgctgcccgtgcgctggatgtctcctgagtccctcaaggatggagtcttcaccacttactcggacgtctggtccttcggggtcgtcctctgggagatcgccacactggccgagcagccctaccagggcttgtccaacgagcaagtccttcgcttcgtcatggagggcggccttctggacaagccagacaactgtcctgacatgctgtttgaactgatgcgcatgtgctggcagtataaccccaagatgaggccttccttcctggagatcatcagcagcatcaaagaggagatggagcctggcttccgggaggtctccttctactacagcgaggagaacaagctgcccgagccggaggagctggacctggagccagagaacatggagagcgtccccctggacccctcggcctcctcgtcctccctgccactgcccgacagacactcaggacacaaggccgagaacggccccggccctggggtgctggtcctccgcgccagcttcgacgagagacagccttacgcccacatgaacgggggccgcaagaacgagcgggccttgccgctgccccagtcttcgacctgctga

SEQ ID NO: 1989 - protein, 1367 aa, Artificial Sequence
  human IGF-R1 construct
MKSGSGGGSPTSLWGLLFLSAALSLWPTSGEICGPGIDIRNDYQQLKRLENCTVIEGYLHILLISKAEDYRSYRFPKLTVITEYLLLFRVAGLESLGDLFPNLTVIRGWKLFYNYALVIFEMTNLKDIGLYNLRNITRGAIRIEKNADLCYLSTVDWSLILDAVSNNYIVGNKPPKECGDLCPGTMEEKPMCEKTTINNEYNYRCWTTNRCQKMCPSTCGKRACTENNECCHPECLGSCSAPDNDTACVACRHYYYAGVCVPACPPNTYRFEGWRCVDRDFCANILSAESSDSEGFVIHDGECMQECPSGFIRNGSQSMYCIPCEGPCPKVCEEEKKTKTIDSVTSAQMLQGCTIFKGNLLINIRRGNNIASELENFMGLIEVVTGYVKIRHSHALVSLSFLKNLRLILGEEQLEGNYSFYVLDNQNLQQLWDWDHRNLTIKAGKMYFAFNPKLCVSEIYRMEEVTGTKGRQSKGDINTRNNGERASCESDVLHFTSTTTSKNRIIITWHRYRPPDYRDLISFTVYYKEAPFKNVTEYDGQDACGSNSWNMVDVDLPPNKDVEPGILLHGLKPWTQYAVYVKAVTLTMVENDHIRGAKSEILYIRTNASVPSIPLDVLSASNSSSQLIVKWNPPSLPNGNLSYYIVRWQRQPQDGYLYRHNYCSKDKIPIRKYADGTIDIEEVTENPKTEVCGGEKGPCCACPKTEAEKQAEKEEAEYRKVFENFLHNSIFVPRPERKRRDVMQVANTTMSSRSRNTTAADTYNITDPEELETEYPFFESRVDNKERTVISNLRPFTLYRIDIHSCNHEAEKLGCSASNFVFARTMPAEGADDIPGPVTWEPRPENSIFLKWPEPENPNGLILMYEIKYGSQVEDQRECVSRQEYRKYGGAKLNRLNPGNYTARIQATSLSGNGSWTDPVFFYVQAKTGYENFIHLIIALPVAVLLIVGGLVIMLYVFHRKRNNSRLGNGVLYASVNPEYFSAADVYVPDEWEVAREKITMSRELGQGSFGMVYEGVAKGVVKDEPETRVAIKTVNEAASMRERIEFLNEASVMKEFNCHHVVRLLGVVSQGQPTLVIMELMTRGDLKSYLRSLRPEMENNPVLAPPSLSKMIQMAGEIADGMAYLNANKFVHRDLAARNCMVAEDFTVKIGDFGMTRDIYETDYYRKGGKGLLPVRWMSPESLKDGVFTTYSDVWSFGVVLWEIATLAEQPYQGLSNEQVLRFVMEGGLLDKPDNCPDMLFELMRMCWQYNPKMRPSFLEIISSIKEEMEPGFREVSFYYSEENKLPEPEELDLEPENMESVPLDPSASSSSLPLPDRHSGHKAENGPGPGVLVLRASFDERQPYAHMNGGRKNERALPLPQSSTC

SEQ ID NO: 1990 - DNA, 3531 bp, Artificial Sequence
  soluble fusion protein of h IGF-R1 and m IgG1 Fc
atgaagtctggctccggcggagggtccccgacctcgctgtgggggctcctgtttctctccgccgcgctctcgctctggccgacgagtggagaaatctgcgggccaggcatcgacatccgcaacgactatcagcagctgaagcgcctggagaactgcacggtgatcgagggctacctccacatcctgctcatctccaaggccgaggactaccgcagctaccgcttccccaagctcacggtcattaccgagtacttgctgctgttccgagtggctggcctcgagagcctcggagacctcttccccaacctcacggtcatccgcggctggaaactcttctacaactacgccctggtcatcttcgagatgaccaatctcaaggatattgggctttacaacctgaggaacattactcggggggccatcaggattgagaaaaatgctgacctctgttacctctccactgtggactggtccctgatcctggatgcggtgtccaataactacattgtggggaataagcccccaaaggaatgtggggacctgtgtccagggaccatggaggagaagccgatgtgtgagaagaccaccatcaacaatgagtacaactaccgctgctggaccacaaaccgctgccagaaaatgtgcccaagcacgtgtgggaagcgggcgtgcaccgagaacaatgagtgctgccaccccgagtgcctgggcagctgcagcgcgcctgacaacgacacggcctgtgtagcttgccgccactactactatgccggtgtctgtgtgcctgcctgcccgcccaacacctacaggtttgagggctggcgctgtgtggaccgtgacttctgcgccaacatcctcagcgccgagagcagcgactccgaggggtttgtgatccacgacggcgagtgcatgcaggagtgcccctcgggcttcatccgcaacggcagccagagcatgtactgcatcccttgtgaaggtccttgcccgaaggtctgtgaggaagaaaagaaaacaaagaccattgattctgttacttctgctcagatgctccaaggatgcaccatcttcaagggcaatttgctcattaacatccgacgggggaataacattgcttcagagctggagaacttcatggggctcatcgaggtggtgacgggctacgtgaagatccgccattctcatgccttggtctccttgtccttcctaaaaaaccttcgcctcatcctaggagaggagcagctagaagggaattactccttctacgtcctcgacaaccagaacttgcagcaactgtgggactgggaccaccgcaacctgaccatcaaagcagggaaaatgtactttgctttcaatcccaaattatgtgtttccgaaatttaccgcatggaggaagtgacggggactaaagggcgccaaagcaaaggggacataaacaccaggaacaacggggagagagcctcctgtgaaagtgacgtcctgcatttcacctccaccaccacgtcgaagaatcgcatcatcataacctggcaccggtaccggccccctgactacagggatctcatcagcttcaccgtttactacaaggaagcaccctttaagaatgtcacagagtatgatgggcaggatgcctgcggctccaacagctggaacatggtggacgtggacctcccgcccaacaaggacgtggagcccggcatcttactacatgggctgaagccctggactcagtacgccgtttacgtcaaggctgtgaccctcaccatggtggagaacgaccatatccgtggggccaagagtgagatcttgtacattcgcaccaatgcttcagttccttccattcccttggacgttctttcagcatcgaactcctcttctcagttaatcgtgaagtggaaccctccctctctgcccaacggcaacctgagttactacattgtgcgctggcagcggcagcctcaggacggctacctttaccggcacaattactgctccaaagacaaaatccccatcaggaagtatgccgacggcaccatcgacattgaggaggtcacagagaaccccaagactgaggtgtgtggtggggagaaagggccttgctgcgcctgccccaaaactgaagccgagaagcaggccgagaaggaggaggctgaataccgcaaagtctttgagaatttcctgcacaactccatcttcgtgcccagacctgaaaggaagcggagagatgtcatgcaagtggccaacaccaccatgtccagccgaagcaggaacaccacggccgcagacacctacaacatcaccgacccggaagagctggagacagagtaccctttctttgagagcagagtggataacaaggagagaactgtcatttctaaccttcggcctttcacattgtaccgcatcgatatccacagctgcaaccacgaggctgagaagctgggctgcagcgcctccaacttcgtctttgcaaggactatgcccgcagaaggagcagatgacattcctgggccagtgacctgggagccaaggcctgaaaactccatctttttaaagtggccggaacctgagaatcccaatggattgattctaatgtatgaaataaaatacggatcacaagttgaggatcagcgagaatgtgtgtccagacaggaatacaggaagtatggaggggccaagctaaaccggctaaacccggggaactacacagcccggattcaggccacatctctctctgggaatgggtcgtggacagatcctgtgttcttctatgtccaggccaaaacaggatatgaaaacttcatccattccggaggtggtggatccgtgcccagggattgtggttgtaagccttgcatatgtacagtcccagaagtatcatctgtcttcatcttccccccaaagcccaaggatgtgctcaccattactctgactcctaaggtcacgtgtgttgtggtagacatcagcaaggatgatcccgaggtccagttcagctggtttgtagatgatgtggaggtgcacacagctcagacgaaaccccgggaggagcagatcaacagcactttccgttcagtcagtgaacttcccatcatgcaccaggactggctcaatggcaaggagttcaaatgcagggtcaacagtgcagctttccctgcccccatcgagaaaaccatctccaaaaccaaaggcagaccgaaggctccacaggtgtacaccattccacctcccaaggagcagatggccaaggataaagtcagtctgacctgcatgataacaaacttcttccctgaagacattactgtggagtggcagtggaatgggcagccagcggagaactacaagaacactcagcccatcatggacacagatggctcttacttcgtctacagcaagctcaatgtgcagaagagcaactgggaggcaggaaatactttcacctgctctgtgttacatgagggcctgcacaaccaccatactgagaagagcctctcccactctcctggtaaatccgggcatcatcaccatcatcattga

SEQ ID NO: 1991 - protein, 1176 aa, Artificial Sequence
  soluble fusion protein of h IGF-R1 and m IgG1 Fc
MKSGSGGGSPTSLWGLLFLSAALSLWPTSGEICGPGIDIRNDYQQLKRLENCTVIEGYLHILLISKAEDYRSYRFPKLTVITEYLLLFRVAGLESLGDLFPNLTVIRGWKLFYNYALVIFEMTNLKDIGLYNLRNITRGAIRIEKNADLCYLSTVDWSLILDAVSNNYIVGNKPPKECGDLCPGTMEEKPMCEKTTINNEYNYRCWTTNRCQKMCPSTCGKRACTENNECCHPECLGSCSAPDNDTACVACRHYYYAGVCVPACPPNTYRFEGWRCVDRDFCANILSAESSDSEGFVIHDGECMQECPSGFIRNGSQSMYCIPCEGPCPKVCEEEKKTKTIDSVTSAQMLQGCTIFKGNLLINIRRGNNIASELENFMGLIEVVTGYVKIRHSHALVSLSFLKNLRLILGEEQLEGNYSFYVLDNQNLQQLWDWDHRNLTIKAGKMYFAFNPKLCVSEIYRMEEVTGTKGRQSKGDINTRNNGERASCESDVLHFTSTTTSKNRIIITWHRYRPPDYRDLISFTVYYKEAPFKNVTEYDGQDACGSNSWNMVDVDLPPNKDVEPGILLHGLKPWTQYAVYVKAVTLTMVENDHIRGAKSEILYIRTNASVPSIPLDVLSASNSSSQLIVKWNPPSLPNGNLSYYIVRWQRQPQDGYLYRHNYCSKDKIPIRKYADGTIDIEEVTENPKTEVCGGEKGPCCACPKTEAEKQAEKEEAEYRKVFENFLHNSIFVPRPERKRRDVMQVANTTMSSRSRNTTAADTYNITDPEELETEYPFFESRVDNKERTVISNLRPFTLYRIDIHSCNHEAEKLGCSASNFVFARTMPAEGADDIPGPVTWEPRPENSIFLKWPEPENPNGLILMYEIKYGSQVEDQRECVSRQEYRKYGGAKLNRLNPGNYTARIQATSLSGNGSWTDPVFFYVQAKTGYENFIHSGGGGSVPRDCGCKPCICTVPEVSSVFIFPPKPKDVLTITLTPKVTCVVVDISKDDPEVQFSWFVDDVEVHTAQTKPREEQINSTFRSVSELPIMHQDWLNGKEFKCRVNSAAFPAPIEKTISKTKGRPKAPQVYTIPPPKEQMAKDKVSLTCMITNFFPEDITVEWQWNGQPAENYKNTQPIMDTDGSYFVYSKLNVQKSNWEAGNTFTCSVLHEGLHNHHTEKSLSHSPGKSGHHHHHH

SEQ ID NO: 1992 - DNA, 4101 bp, Artificial Sequence
  murine IGF-R1 construct
atgggatggagctgtatcatcctcttcttggtagcaacagctacaggtgtacactccgattacaaggacgacgatgacaaggaaatctgtgggcccggcattgacatccgcaacgactatcagcagctgaagcgcctggaaaactgcacggtgatcgagggcttcctccacatcctgctcatctccaaggccgaggactaccgaagctaccgcttccccaagctcaccgtcatcactgagtacttgctgctcttccgagtcgctggcctcgagagcctgggagacctcttccccaacctcacagtcatccgtggctggaaactcttctacaactacgcactggtcatcttcgagatgaccaatctcaaggatattgggctttataatctgaggaacattactcggggggccatcaggattgagaagaacgccgacctctgttacctctccaccatagactggtctctcatcttggatgcggtgtccaataactacattgtggggaacaagcccccgaaggaatgtggggacctgtgtccagggacattggaggagaagcccatgtgtgagaagaccaccatcaacaatgagtacaactaccgctgctggaccacaaatcgctgccagaaaatgtgcccaagtgtgtgcgggaagcgagcctgcaccgagaacaacgagtgctgccacccggagtgcctgggcagctgccacacaccggacgacaacacaacctgcgtggcctgcagacactactactacaaaggcgtgtgtgtgcctgcctgcccgcctggcacctacaggttcgagggctggcgctgtgtggatcgcgatttctgcgccaacatccccaacgctgagagcagtgactcggatggcttcgttatccacgacgatgagtgcatgcaggagtgtccctcaggcttcatccgcaacagcacccagagcatgtactgtatcccctgcgaaggcccctgccccaaagtctgcggcgatgaagagaagaaaacgaaaaccatcgattcggtgacttctgctcaaatgctccaaggatgcaccatcctgaagggcaatctgcttattaacatccggagaggcaataacattgcctcggagttggagaacttcatggggctcatcgaggtggtgaccggctacgtgaagatccgccattctcatgccttggtctccttgtccttcctgaagaaccttcgtctcatcttaggagaggagcagctggaagggaactactccttctatgtcctagacaaccagaacttgcagcagctgtgggactggaaccaccggaacctgaccgtcaggtccggaaagatgtactttgctttcaatcccaagctgtgtgtctccgaaatttaccgcatggaggaagtgaccggaaccaagggacgccagagcaaaggggacataaacaccaggaacaacggagagcgagcttcctgtgaaagtgatgttctccgtttcacctccaccacgacctggaagaaccgaatcatcataacgtggcaccggtaccggccgccggactaccgggatctcatcagcttcacagtttactacaaggaggcaccatttaaaaacgttacggaatatgacgggcaggatgcctgtggctccaacagctggaacatggtggatgtagacctgcctccgaacaaggagggcgagcctggcattttactgcatgggctgaagccctggacccagtatgctgtctatgtcaaggctgtgaccctcaccatggtggaaaacgaccatatccgtggggccaaaagtgaaatcttgtacattcgcaccaatgcttcagtcccttccattcccctagatgtcctctcagcatcaaactcttcctctcagctgattgtgaagtggaatcctccaactctgcccaatggtaacttgagttactacattgtgaggtggcagcggcagccccaggatggttacctgtaccggcacaactactgctccaaagacaaaatacccatcagaaagtacgccgatggtaccatcgacgtggaggaggtgacggaaaatcccaagacagaagtgtgtggtggtgataaagggccatgctgcgcttgccctaaaactgaagctgagaagcaggctgagaaggaggaggctgagtaccgtaaagtctttgagaatttccttcacaattccatctttgtgcccaggcccgaaaggaggcggagagacgtcatgcaagtggccaacacgaccatgtccagccgaagcaggaacaccacggtagctgacacctacaatatcacagacccggaggagttcgagacagagtaccctttctttgagagcagagtggataacaaggagaggactgtcatctccaacctccggcctttcactctgtaccgcatcgatatccacagctgcaaccacgaggctgagaagctgggctgcagcgcctccaacttcgtctttgcgagaaccatgccagcagaaggagcagatgatatccctggtccggtgacctgggagccaagacccgaaaactccatctttttaaagtggccagaacccgagaaccccaacggattgatcctaatgtatgaaattaaatacgggtcgcaagtcgaggatcagcgggaatgtgtgtccagacaggagtacaggaagtacggaggggccaaactcaaccgtctaaacccagggaactatacagcccggattcaggctacctccctctctgggaatgggtcatggacagatcctgtgttcttctatgtccccgccaaaacgacgtatgagaacttcatgcatctgatcattgctctgccggttgccatcctgctgatcgttggggggctggttatcatgctgtatgtcttccatagaaagagaaataacagcaggttgggcaatggagtgctgtatgcttctgtgaaccccgagtatttcagcgcagctgatgtgtacgtgcctgatgaatgggaggtagctcgagagaagatcaccatgaaccgggagctcggacaagggtcctttgggatggtctatgaaggagtggccaagggtgtggtcaaggatgaacccgaaaccagagtggccatcaagacggtaaacgaggctgcaagtatgcgtgaaagaatcgagtttctcaacgaggcctcggtgatgaaggagttcaattgtcaccatgtggtccggttgctgggtgtggtatcccaaggccagcccaccctggtcatcatggaactaatgacacgcggtgatctcaaaagttatctccggtctctgaggccagaagtggagcagaataatctagtcctcattcctccgagcttaagcaagatgatccagatggctggagagattgcagatggcatggcctacctcaatgccaacaagttcgtccacagagaccttgctgctaggaactgcatggtagccgaagatttcacagtcaaaattggagatttcggtatgacacgagacatctacgagacggactactaccggaaaggcgggaaggggttgctgcctgtgcgctggatgtctcccgagtccctcaaggatggtgtcttcactactcattctgatgtctggtccttcggggtcgtcctctgggagatcgccacgctggctgagcagccctaccagggcttgtccaacgagcaagttcttcgtttcgtcatggagggtggccttctggacaagccggacaactgccctgatatgctgtttgaacttatgcgcatgtgctggcagtataaccccaagatgcggccctccttcctggagatcatcggcagcatcaaggatgagatggagcccagcttccaggaggtctccttctactacagcgaggagaacaagcctcccgagccagaggagctggagatggagcctgagaacatggagagcgtcccactggacccttcggcctcctcagcctccctgcctctgcctgaaagacactcaggacacaaggctgagaatggcccgggccctggcgtgctcgttctccgcgccagttttgatgagagacagccttacgctcacatgaacgggggacgcgccaacgagagggccttgcctctgccccagtcctcgacctgctga

SEQ ID NO: 1993 - protein, 1366 aa, Artificial Sequence
  murine IGF-R1 construct
MGWSCIILFLVATATGVHSDYKDDDDKEICGPGIDIRNDYQQLKRLENCTVIEGFLHILLISKAEDYRSYRFPKLTVITEYLLLFRVAGLESLGDLFPNLTVIRGWKLFYNYALVIFEMTNLKDIGLYNLRNITRGAIRIEKNADLCYLSTIDWSLILDAVSNNYIVGNKPPKECGDLCPGTLEEKPMCEKTTINNEYNYRCWTTNRCQKMCPSVCGKRACTENNECCHPECLGSCHTPDDNTTCVACRHYYYKGVCVPACPPGTYRFEGWRCVDRDFCANIPNAESSDSDGFVIHDDECMQECPSGFIRNSTQSMYCIPCEGPCPKVCGDEEKKTKTIDSVTSAQMLQGCTILKGNLLINIRRGNNIASELENFMGLIEVVTGYVKIRHSHALVSLSFLKNLRLILGEEQLEGNYSFYVLDNQNLQQLWDWNHRNLTVRSGKMYFAFNPKLCVSEIYRMEEVTGTKGRQSKGDINTRNNGERASCESDVLRFTSTTTWKNRIIITWHRYRPPDYRDLISFTVYYKEAPFKNVTEYDGQDACGSNSWNMVDVDLPPNKEGEPGILLHGLKPWTQYAVYVKAVTLTMVENDHIRGAKSEILYIRTNASVPSIPLDVLSASNSSSQLIVKWNPPTLPNGNLSYYIVRWQRQPQDGYLYRHNYCSKDKIPIRKYADGTIDVEEVTENPKTEVCGGDKGPCCACPKTEAEKQAEKEEAEYRKVFENFLHNSIFVPRPERRRRDVMQVANTTMSSRSRNTTVADTYNITDPEEFETEYPFFESRVDNKERTVISNLRPFTLYRIDIHSCNHEAEKLGCSASNFVFARTMPAEGADDIPGPVTWEPRPENSIFLKWPEPENPNGLILMYEIKYGSQVEDQRECVSRQEYRKYGGAKLNRLNPGNYTARIQATSLSGNGSWTDPVFFYVPAKTTYENFMHLIIALPVAILLIVGGLVIMLYVFHRKRNNSRLGNGVLYASVNPEYFSAADVYVPDEWEVAREKITMNRELGQGSFGMVYEGVAKGVVKDEPETRVAIKTVNEAASMRERIEFLNEASVMKEFNCHHVVRLLGVVSQGQPTLVIMELMTRGDLKSYLRSLRPEVEQNNLVLIPPSLSKMIQMAGEIADGMAYLNANKFVHRDLAARNCMVAEDFTVKIGDFGMTRDIYETDYYRKGGKGLLPVRWMSPESLKDGVFTTHSDVWSFGVVLWEIATLAEQPYQGLSNEQVLRFVMEGGLLDKPDNCPDMLFELMRMCWQYNPKMRPSFLEIIGSIKDEMEPSFQEVSFYYSEENKPPEPEELEMEPENMESVPLDPSASSASLPLPERHSGHKAENGPGPGVLVLRASFDERQPYAHMNGGRANERALPLPQSSTC

SEQ ID NO: 1994 - DNA, 4095 bp, Artificial Sequence
  mutated human IGF-R1 antigen
atgggatggagctgtatcatcctcttcttggtagcaacagctacaggtgtacactccgattacaaggacgacgatgacaaggaaatctgtgggcccggcattgacatccgcaacgactatcagcagctgaagcgcctggaaaactgcacggtgatcgagggcttcctccacatcctgctcatctccaaggccgaggactaccgaagctaccgcttccccaagctcaccgtcatcactgagtacttgctgctcttccgagtcgctggcctcgagagcctgggagacctcttccccaacctcacagtcatccgtggctggaaactcttctacaactacgcactggtcatcttcgagatgaccaatctcaaggatattgggctttataatctgaggaacattactcggggggccatcaggattgagaagaacgccgacctctgttacctctccaccatagactggtctctcatcttggatgcggtgtccaataactacattgtggggaacaagcccccgaaggaatgtggggacctgtgtccagggacattggaggagaagcccatgtgtgagaagaccaccatcaacaatgagtacaactaccgctgctggaccacaaatcgctgccagaaaatgtgcccaagtgtgtgcgggaagcgagcctgcaccgagaacaacgagtgctgccacccggagtgcctgggcagctgccacacaccggacgacaacacaacctgcgtggcctgcagacactactactacaaaggcgtgtgtgtgcctgcctgcccgcctggcacctacaggttcgagggctggcgctgtgtggatcgcgatttctgcgccaacatccccaacgctgagagcagtgactcggatggcttcgttatccacgacgatgagtgcatgcaggagtgtccctcaggcttcatccgcaacagcacccagagcatgtactgtatcccctgcgaaggcccctgccccaaggtctgtgaggaagaaaagaaaacaaagaccattgattctgttacttctgctcagatgctccaaggatgcaccatcttcaagggcaatttgctcattaacatccgacgggggaataacattgcttcagagctggagaacttcatggggctcatcgaggtggtgacgggctacgtgaagatccgccattctcatgccttggtctccttgtccttcctaaaaaaccttcgcctcatcctaggagaggagcagctagaagggaattactccttctacgtcctcgacaaccagaacttgcagcaactgtgggactgggaccaccgcaacctgaccatcaaagcagggaaaatgtactttgctttcaatcccaaattatgtgtttccgaaatttaccgcatggaggaagtgacggggactaaagggcgccaaagcaaaggggacataaacaccaggaacaacggggagagagcctcctgtgaaagtgacgtcctgcatttcacctccaccaccacgtcgaagaatcgcatcatcataacctggcaccggtaccggccccctgactacagggatctcatcagcttcaccgtttactacaaggaagcaccctttaagaatgtcacagagtatgatgggcaggatgcctgcggctccaacagctggaacatggtggacgtggacctcccgcccaacaaggacgtggagcccggcatcttactacatgggctgaagccctggactcagtacgccgtttacgtcaaggctgtgaccctcaccatggtggagaacgaccatatccgtggggccaagagtgagatcttgtacattcgcaccaatgcttcagttccttccattcccttggacgttctttcagcatcgaactcctcttctcagttaatcgtgaagtggaaccctccctctctgcccaacggcaacctgagttactacattgtgcgctggcagcggcagcctcaggacggctacctttaccggcacaattactgctccaaagacaaaatccccatcaggaagtatgccgacggcaccatcgacattgaggaggtcacagagaaccccaagactgaggtgtgtggtggggagaaagggccttgctgcgcctgccccaaaactgaagccgagaagcaggccgagaaggaggaggctgaataccgcaaagtctttgagaatttcctgcacaactccatcttcgtgcccagacctgaaaggaagcggagagatgtcatgcaagtggccaacaccaccatgtccagccgaagcaggaacaccacggccgcagacacctacaacatcaccgacccggaagagctggagacagagtaccctttctttgagagcagagtggataacaaggagagaactgtcatttctaaccttcggcctttcacattgtaccgcatcgatatccacagctgcaaccacgaggctgagaagctgggctgcagcgcctccaacttcgtctttgcaaggactatgcccgcagaaggagcagatgacattcctgggccagtgacctgggagccaaggcctgaaaactccatctttttaaagtggccggaacctgagaatcccaatggattgattctaatgtatgaaataaaatacggatcacaagttgaggatcagcgagaatgtgtgtccagacaggaatacaggaagtatggaggggccaagctaaaccggctaaacccggggaactacacagcccggattcaggccacatctctctctgggaatgggtcgtggacagatcctgtgttcttctatgtccaggccaaaacaggatatgaaaacttcatccatctgatcatcgctctgcccgtcgctgtcctgttgatcgtgggagggttggtgattatgctgtacgtcttccatagaaagagaaataacagcaggctggggaatggagtgctgtatgcctctgtgaacccggagtacttcagcgctgctgatgtgtacgttcctgatgagtgggaggtggctcgggagaagatcaccatgagccgggaacttgggcaggggtcgtttgggatggtctatgaaggagttgccaagggtgtggtgaaagatgaacctgaaaccagagtggccattaaaacagtgaacgaggccgcaagcatgcgtgagaggattgagtttctcaacgaagcttctgtgatgaaggagttcaattgtcaccatgtggtgcgattgctgggtgtggtgtcccaaggccagccaacactggtcatcatggaactgatgacacggggcgatctcaaaagttatctccggtctctgaggccagaaatggagaataatccagtcctagcacctccaagcctgagcaagatgattcagatggccggagagattgcagacggcatggcatacctcaacgccaataagttcgtccacagagaccttgctgcccggaattgcatggtagccgaagatttcacagtcaaaatcggagattttggtatgacgcgagatatctatgagacagactattaccggaaaggagggaaagggctgctgcccgtgcgctggatgtctcctgagtccctcaaggatggagtcttcaccacttactcggacgtctggtccttcggggtcgtcctctgggagatcgccacactggccgagcagccctaccagggcttgtccaacgagcaagtccttcgcttcgtcatggagggcggccttctggacaagccagacaactgtcctgacatgctgtttgaactgatgcgcatgtgctggcagtataaccccaagatgaggccttccttcctggagatcatcagcagcatcaaagaggagatggagcctggcttccgggaggtctccttctactacagcgaggagaacaagctgcccgagccggaggagctggacctggagccagagaacatggagagcgtccccctggacccctcggcctcctcgtcctccctgccactgcccgacagacactcaggacacaaggccgagaacggccccggccctggggtgctggtcctccgcgccagcttcgacgagagacagccttacgcccacatgaacgggggccgcaagaacgagcgggccttgccgctgccccagtcttcgacctgctga

SEQ ID NO: 1995 - protein, 1364 aa, Artificial Sequence
  mutated human IGF-R1 antigen
MGWSCIILFLVATATGVHSDYKDDDDKEICGPGIDIRNDYQQLKRLENCTVIEGFLHILLISKAEDYRSYRFPKLTVITEYLLLFRVAGLESLGDLFPNLTVIRGWKLFYNYALVIFEMTNLKDIGLYNLRNITRGAIRIEKNADLCYLSTIDWSLILDAVSNNYIVGNKPPKECGDLCPGTLEEKPMCEKTTINNEYNYRCWTTNRCQKMCPSVCGKRACTENNECCHPECLGSCHTPDDNTTCVACRHYYYKGVCVPACPPGTYRFEGWRCVDRDFCANIPNAESSDSDGFVIHDDECMQECPSGFIRNSTQSMYCIPCEGPCPKVCEEEKKTKTIDSVTSAQMLQGCTIFKGNLLINIRRGNNIASELENFMGLIEVVTGYVKIRHSHALVSLSFLKNLRLILGEEQLEGNYSFYVLDNQNLQQLWDWDHRNLTIKAGKMYFAFNPKLCVSEIYRMEEVTGTKGRQSKGDINTRNNGERASCESDVLHFTSTTTSKNRIIITWHRYRPPDYRDLISFTVYYKEAPFKNVTEYDGQDACGSNSWNMVDVDLPPNKDVEPGILLHGLKPWTQYAVYVKAVTLTMVENDHIRGAKSEILYIRTNASVPSIPLDVLSASNSSSQLIVKWNPPSLPNGNLSYYIVRWQRQPQDGYLYRHNYCSKDKIPIRKYADGTIDIEEVTENPKTEVCGGEKGPCCACPKTEAEKQAEKEEAEYRKVFENFLHNSIFVPRPERKRRDVMQVANTTMSSRSRNTTAADTYNITDPEELETEYPFFESRVDNKERTVISNLRPFTLYRIDIHSCNHEAEKLGCSASNFVFARTMPAEGADDIPGPVTWEPRPENSIFLKWPEPENPNGLILMYEIKYGSQVEDQRECVSRQEYRKYGGAKLNRLNPGNYTARIQATSLSGNGSWTDPVFFYVQAKTGYENFIHLIIALPVAVLLIVGGLVIMLYVFHRKRNNSRLGNGVLYASVNPEYFSAADVYVPDEWEVAREKITMSRELGQGSFGMVYEGVAKGVVKDEPETRVAIKTVNEAASMRERIEFLNEASVMKEFNCHHVVRLLGVVSQGQPTLVIMELMTRGDLKSYLRSLRPEMENNPVLAPPSLSKMIQMAGEIADGMAYLNANKFVHRDLAARNCMVAEDFTVKIGDFGMTRDIYETDYYRKGGKGLLPVRWMSPESLKDGVFTTYSDVWSFGVVLWEIATLAEQPYQGLSNEQVLRFVMEGGLLDKPDNCPDMLFELMRMCWQYNPKMRPSFLEIISSIKEEMEPGFREVSFYYSEENKLPEPEELDLEPENMESVPLDPSASSSSLPLPDRHSGHKAENGPGPGVLVLRASFDERQPYAHMNGGRKNERALPLPQSSTC

SEQ ID NO: 1996 - DNA, 4101 bp, Artificial Sequence
  mutated murine IGF-R1 antigen
atgggatggagctgtatcatcctcttcttggtagcaacagctacaggtgtacactccgattacaaggacgacgatgacaaggaaatctgcgggccaggcatcgacatccgcaacgactatcagcagctgaagcgcctggagaactgcacggtgatcgagggctacctccacatcctgctcatctccaaggccgaggactaccgcagctaccgcttccccaagctcacggtcattaccgagtacttgctgctgttccgagtggctggcctcgagagcctcggagacctcttccccaacctcacggtcatccgcggctggaaactcttctacaactacgccctggtcatcttcgagatgaccaatctcaaggatattgggctttacaacctgaggaacattactcggggggccatcaggattgagaaaaatgctgacctctgttacctctccactgtggactggtccctgatcctggatgcggtgtccaataactacattgtggggaataagcccccaaaggaatgtggggacctgtgtccagggaccatggaggagaagccgatgtgtgagaagaccaccatcaacaatgagtacaactaccgctgctggaccacaaaccgctgccagaaaatgtgcccaagcacgtgtgggaagcgggcgtgcaccgagaacaatgagtgctgccaccccgagtgcctgggcagctgcagcgcgcctgacaacgacacggcctgtgtagcttgccgccactactactatgccggtgtctgtgtgcctgcctgcccgcccaacacctacaggtttgagggctggcgctgtgtggaccgtgacttctgcgccaacatcctcagcgccgagagcagcgactccgaggggtttgtgatccacgacggcgagtgcatgcaggagtgcccctcgggcttcatccgcaacggcagccagagcatgtactgcatcccttgtgaaggtccttgcccgaaagtctgcggcgatgaagagaagaaaacgaaaaccatcgattcggtgacttctgctcaaatgctccaaggatgcaccatcctgaagggcaatctgcttattaacatccggagaggcaataacattgcctcggagttggagaacttcatggggctcatcgaggtggtgaccggctacgtgaagatccgccattctcatgccttggtctccttgtccttcctgaagaaccttcgtctcatcttaggagaggagcagctggaagggaactactccttctatgtcctagacaaccagaacttgcagcagctgtgggactggaaccaccggaacctgaccgtcaggtccggaaagatgtactttgctttcaatcccaagctgtgtgtctccgaaatttaccgcatggaggaagtgaccggaaccaagggacgccagagcaaaggggacataaacaccaggaacaacggagagcgagcttcctgtgaaagtgatgttctccgtttcacctccaccacgacctggaagaaccgaatcatcataacgtggcaccggtaccggccgccggactaccgggatctcatcagcttcacagtttactacaaggaggcaccatttaaaaacgttacggaatatgacgggcaggatgcctgtggctccaacagctggaacatggtggatgtagacctgcctccgaacaaggagggcgagcctggcattttactgcatgggctgaagccctggacccagtatgctgtctatgtcaaggctgtgaccctcaccatggtggaaaacgaccatatccgtggggccaaaagtgaaatcttgtacattcgcaccaatgcttcagtcccttccattcccctagatgtcctctcagcatcaaactcttcctctcagctgattgtgaagtggaatcctccaactctgcccaatggtaacttgagttactacattgtgaggtggcagcggcagccccaggatggttacctgtaccggcacaactactgctccaaagacaaaatacccatcagaaagtacgccgatggtaccatcgacgtggaggaggtgacggaaaatcccaagacagaagtgtgtggtggtgataaagggccatgctgcgcttgccctaaaactgaagctgagaagcaggctgagaaggaggaggctgagtaccgtaaagtctttgagaatttccttcacaattccatctttgtgcccaggcccgaaaggaggcggagagacgtcatgcaagtggccaacacgaccatgtccagccgaagcaggaacaccacggtagctgacacctacaatatcacagacccggaggagttcgagacagagtaccctttctttgagagcagagtggataacaaggagaggactgtcatctccaacctccggcctttcactctgtaccgcatcgatatccacagctgcaaccacgaggctgagaagctgggctgcagcgcctccaacttcgtctttgcgagaaccatgccagcagaaggagcagatgatatccctggtccggtgacctgggagccaagacccgaaaactccatctttttaaagtggccagaacccgagaaccccaacggattgatcctaatgtatgaaattaaatacgggtcgcaagtcgaggatcagcgggaatgtgtgtccagacaggagtacaggaagtacggaggggccaaactcaaccgtctaaacccagggaactatacagcccggattcaggctacctccctctctgggaatgggtcatggacagatcctgtgttcttctatgtccccgccaaaacgacgtatgagaacttcatgcatctgatcattgctctgccggttgccatcctgctgatcgttggggggctggttatcatgctgtatgtcttccatagaaagagaaataacagcaggttgggcaatggagtgctgtatgcttctgtgaaccccgagtatttcagcgcagctgatgtgtacgtgcctgatgaatgggaggtagctcgagagaagatcaccatgaaccgggagctcggacaagggtcctttgggatggtctatgaaggagtggccaagggtgtggtcaaggatgaacccgaaaccagagtggccatcaagacggtaaacgaggctgcaagtatgcgtgaaagaatcgagtttctcaacgaggcctcggtgatgaaggagttcaattgtcaccatgtggtccggttgctgggtgtggtatcccaaggccagcccaccctggtcatcatggaactaatgacacgcggtgatctcaaaagttatctccggtctctgaggccagaagtggagcagaataatctagtcctcattcctccgagcttaagcaagatgatccagatggctggagagattgcagatggcatggcctacctcaatgccaacaagttcgtccacagagaccttgctgctaggaactgcatggtagccgaagatttcacagtcaaaattggagatttcggtatgacacgagacatctacgagacggactactaccggaaaggcgggaaggggttgctgcctgtgcgctggatgtctcccgagtccctcaaggatggtgtcttcactactcattctgatgtctggtccttcggggtcgtcctctgggagatcgccacgctggctgagcagccctaccagggcttgtccaacgagcaagttcttcgtttcgtcatggagggtggccttctggacaagccggacaactgccctgatatgctgtttgaacttatgcgcatgtgctggcagtataaccccaagatgcggccctccttcctggagatcatcggcagcatcaaggatgagatggagcccagcttccaggaggtctccttctactacagcgaggagaacaagcctcccgagccagaggagctggagatggagcctgagaacatggagagcgtcccactggacccttcggcctcctcagcctccctgcctctgcctgaaagacactcaggacacaaggctgagaatggcccgggccctggcgtgctcgttctccgcgccagttttgatgagagacagccttacgctcacatgaacgggggacgcgccaacgagagggccttgcctctgccccagtcctcgacctgctga

SEQ ID NO: 1997 - protein, 1366 aa, Artificial Sequence
  mutated murine IGF-R1 antigen
MGWSCIILFLVATATGVHSDYKDDDDKEICGPGIDIRNDYQQLKRLENCTVIEGYLHILLISKAEDYRSYRFPKLTVITEYLLLFRVAGLESLGDLFPNLTVIRGWKLFYNYALVIFEMTNLKDIGLYNLRNITRGAIRIEKNADLCYLSTVDWSLILDAVSNNYIVGNKPPKECGDLCPGTMEEKPMCEKTTINNEYNYRCWTTNRCQKMCPSTCGKRACTENNECCHPECLGSCSAPDNDTACVACRHYYYAGVCVPACPPNTYRFEGWRCVDRDFCANILSAESSDSEGFVIHDGECMQECPSGFIRNGSQSMYCIPCEGPCPKVCGDEEKKTKTIDSVTSAQMLQGCTILKGNLLINIRRGNNIASELENFMGLIEVVTGYVKIRHSHALVSLSFLKNLRLILGEEQLEGNYSFYVLDNQNLQQLWDWNHRNLTVRSGKMYFAFNPKLCVSEIYRMEEVTGTKGRQSKGDINTRNNGERASCESDVLRFTSTTTWKNRIIITWHRYRPPDYRDLISFTVYYKEAPFKNVTEYDGQDACGSNSWNMVDVDLPPNKEGEPGILLHGLKPWTQYAVYVKAVTLTMVENDHIRGAKSEILYIRTNASVPSIPLDVLSASNSSSQLIVKWNPPTLPNGNLSYYIVRWQRQPQDGYLYRHNYCSKDKIPIRKYADGTIDVEEVTENPKTEVCGGDKGPCCACPKTEAEKQAEKEEAEYRKVFENFLHNSIFVPRPERRRRDVMQVANTTMSSRSRNTTVADTYNITDPEEFETEYPFFESRVDNKERTVISNLRPFTLYRIDIHSCNHEAEKLGCSASNFVFARTMPAEGADDIPGPVTWEPRPENSIFLKWPEPENPNGLILMYEIKYGSQVEDQRECVSRQEYRKYGGAKLNRLNPGNYTARIQATSLSGNGSWTDPVFFYVPAKTTYENFMHLIIALPVAILLIVGGLVIMLYVFHRKRNNSRLGNGVLYASVNPEYFSAADVYVPDEWEVAREKITMNRELGQGSFGMVYEGVAKGVVKDEPETRVAIKTVNEAASMRERIEFLNEASVMKEFNCHHVVRLLGVVSQGQPTLVIMELMTRGDLKSYLRSLRPEVEQNNLVLIPPSLSKMIQMAGEIADGMAYLNANKFVHRDLAARNCMVAEDFTVKIGDFGMTRDIYETDYYRKGGKGLLPVRWMSPESLKDGVFTTHSDVWSFGVVLWEIATLAEQPYQGLSNEQVLRFVMEGGLLDKPDNCPDMLFELMRMCWQYNPKMRPSFLEIIGSIKDEMEPSFQEVSFYYSEENKPPEPEELEMEPENMESVPLDPSASSASLPLPERHSGHKAENGPGPGVLVLRASFDERQPYAHMNGGRANERALPLPQSSTC

SEQ ID NO: 1998 - DNA, 4104 bp, Artificial Sequence
  macaque IGF-R1
atgaagtctggctctggagaagggtccccgacctcgctgtgggggctcctgtttctctccgccgcgctctcgctctggccgacgagtggagaaatctgtgggccgggcatcgacatccgcaacgactatcagcagctgaagcgcctggagaactgcacggtgatcgagggctacctccacatcctgctcatctccaaggccgaggactaccgcagctaccgcttccccaagctcacggtcatcaccgagtacttgctgttgttccgagtggctggcctagagagcctcggagacctgttccccaacctcacggtaatccgcggctggaaactcttctacaactacgccctggtcatctttgagatgaccaatctcaaggatattgggctttacaacctgaggaacattactcggggggccatcaggattgagaaaaatgctgacctctgttacctctccactgtggactggtccctgatcctggatgcagtgtccaataactacattgtggggaataagcccccaaaggaatgcggggacctgtgtccggggaccatggaggagaagccgatgtgcgagaagaccaccatcaacaatgagtacaactaccgctgctggaccacaaaccgctgccagaaaatgtgcccgagtgcctgtgggaagagggcatgcaccgagaacaacgagtgctgccaccccgagtgcctgggcagctgcagcgcgcctgacaacgacacggcctgtgtagcttgccgccactactactacgccggtgtctgcgtgcctgcctgcccgcccaacacctacaggtttgagggctggcgctgtgtggaccgtgacttctgcgccaacatcctcagcgccgagagcagcgactccgagggtttcgtgatccacgacggcgagtgcatgcaggagtgcccctcaggcttcatccgcaacggcagccagagcatgtactgcatcccttgtgaaggtccttgccccaaggtctgtgaggaagaaaagaaaacaaagaccattgattctgttacttctgctcagatgctccaaggatgcaccatcttcaagggcaatttgctcattaacatccgacgggggaataacattgcttcagaactggagaacttcatggggctcatcgaggtggtgacgggctacgtgaagatccgccattcccatgccttggtctccttgtccttcctaaaaaaccttcgcctcatcttaggagaggagcagctagaagggaattactccttctacgtcctcgacaaccagaacttgcagcaactatgggactgggaccaccgcaacctgaccatcaaagcagggaaaatgtactttgctttcaatcccaaattgtgtgtttcggaaatttaccgcatggaggaagtgacggggactaaagggcgccaaagcaaaggggacataaacaccaggaacaacggggaaagagcctcctgtgaaagtgacgtcctgcatttcacctccaccaccacgtggaagaatcgcatcatcataacctggcaccggtaccggccccctgactacagggatctcatcagcttcaccgtttactacaaggaagcaccttttaagaatgtcacggagtatgatgggcaggatgcctgcggctccaacagctggaacatggtggatgtggacctcccgcccaacaaggacgtggagcccggcatcttactgcatgggctgaagccctggactcagtacgccgtttacgtcaaggctgtgaccctcaccatggtggagaacgaccatatccgtggggccaagagtgagatcttgtacattcgcaccaatgcttcagttccttccattcccttggacgttctttcagcatcgaactcctcttctcagttaatcgtgaagtggaaccctccctctctgcccaacggcaacctgagttactacattgtgcgctggcagcggcagcctcaggacggctacctttaccggcacaattactgctccaaagacaaaatccccatcaggaagtatgccgacggcaccattgacattgaggaggtcacagagaacccgaagactgaggtgtgtggtggagagaaagggccttgctgcgcctgccccaaaactgaagctgagaagcaggccgagaaggaggaggctgagtaccgcaaagtctttgagaatttcctgcacaactccatctttgtgcccagacctgaaaggaagcggagagatgtcatgcaagtggccaacaccaccatgtccagccgaagcaggaacaccacggtggcagacacctacaacatcacagatctggaagagctagagacagagtaccctttctttgagagcagagtggataataaggagagaactgtcatttctaaccttcggcctttcacattgtaccgcattgatatccacagctgcaaccacgaggctgagaaactgggctgcagcgcctccaactttgtctttgcaaggactatgcctgcagaaggagcagatgacattcctgggccagtgacctgggagccaaggcctgaaaactccatctttttaaagtggccagaacctgagaatcccaatggattgattctaatgtatgaaataaaatacggatcacaagttgaggatcagcgagaatgtgtgtccagacaggaatacaggaagtatggaggggccaagctaaaccggctaaacccagggaactacacagcccggattcaggctacatctctctctgggaatgggtcgtggacagatcctgtgttcttctatgtccaggccaaaacaggatatgaaaacttcatccatctgatcatcgctctgcccgtcgctgtcctgttgatcgtgggagggttggtgatcatgctgtacgtcttccatagaaagagaaataacagcaggctggggaatggagtgctgtacgcgtctgtgaacccggagtacttcagcgctgcggatgtgtacgttcctgatgagtgggaggtggctcgggagaagatcaccatgagccgggaacttgggcaggggtcgtttgggatggtctatgaaggagttgccaagggtgtggtgaaagacgaacctgaaaccagagtggccattaaaacagtgaacgaggccgcgagcatgcgtgaaaggatcgagtttctcaacgaggcttctgtgatgaaggagttcaattgtcaccatgtggtgcggttgctgggtgtggtgtcccagggccagccaacgctggtcatcatggaactgatgacgcggggcgatctcaaaagttatctccggtctctgaggccagaaatggagaataatccagtcctagcacctccaagcctaagcaagatgattcagatggctggagagattgcagacggcatggcatacctcaacgccaacaagttcgtccacagagaccttgctgcccggaattgcatggtagccgaggatttcacagtcaaaattggagattttgggatgacgcgagatatctatgagacagactattaccggaaaggagggaaagggctgttgcccgtgcgctggatgtctcccgagtccctcaaggatggagtcttcaccacttactcggacgtctggtccttcggggttgtcctctgggagatcgccacactggccgagcagccctaccagggcttgtccaacgagcaagtccttcgcttcgtcatggagggcggccttctggacaagccagacaactgccccgacatgctgtttgaattgatgcgcatgtgctggcagtacaaccccaagatgaggccttccttcctggagatcatcagcagcatcaaagacgagatggagcctggcttccgggaggtctccttctactacagtgaggagaacaagctgcccgagccggaggagctggacctggagccagagaacatggagagcgtccccctggacccctcggcctcctcgtcctccctgccactgcccgacagacactcaggacacaaggccgagaacggccccggccctggagtgctggtgctccgcgccagcttcgatgagagacagccttacgcacacatgaacggtggccgcaagaacgagcgggccttgccgctgccccagtcttcgacctgctga

SEQ ID NO: 1999 - protein, 1367 aa, Artificial Sequence
  macaque IGF-R1
MKSGSGEGSPTSLWGLLFLSAALSLWPTSGEICGPGIDIRNDYQQLKRLENCTVIEGYLHILLISKAEDYRSYRFPKLTVITEYLLLFRVAGLESLGDLFPNLTVIRGWKLFYNYALVIFEMTNLKDIGLYNLRNITRGAIRIEKNADLCYLSTVDWSLILDAVSNNYIVGNKPPKECGDLCPGTMEEKPMCEKTTINNEYNYRCWTTNRCQKMCPSACGKRACTENNECCHPECLGSCSAPDNDTACVACRHYYYAGVCVPACPPNTYRFEGWRCVDRDFCANILSAESSDSEGFVIHDGECMQECPSGFIRNGSQSMYCIPCEGPCPKVCEEEKKTKTIDSVTSAQMLQGCTIFKGNLLINIRRGNNIASELENFMGLIEVVTGYVKIRHSHALVSLSFLKNLRLILGEEQLEGNYSFYVLDNQNLQQLWDWDHRNLTIKAGKMYFAFNPKLCVSEIYRMEEVTGTKGRQSKGDINTRNNGERASCESDVLHFTSTTTWKNRIIITWHRYRPPDYRDLISFTVYYKEAPFKNVTEYDGQDACGSNSWNMVDVDLPPNKDVEPGILLHGLKPWTQYAVYVKAVTLTMVENDHIRGAKSEILYIRTNASVPSIPLDVLSASNSSSQLIVKWNPPSLPNGNLSYYIVRWQRQPQDGYLYRHNYCSKDKIPIRKYADGTIDIEEVTENPKTEVCGGEKGPCCACPKTEAEKQAEKEEAEYRKVFENFLHNSIFVPRPERKRRDVMQVANTTMSSRSRNTTVADTYNITDLEELETEYPFFESRVDNKERTVISNLRPFTLYRIDIHSCNHEAEKLGCSASNFVFARTMPAEGADDIPGPVTWEPRPENSIFLKWPEPENPNGLILMYEIKYGSQVEDQRECVSRQEYRKYGGAKLNRLNPGNYTARIQATSLSGNGSWTDPVFFYVQAKTGYENFIHLIIALPVAVLLIVGGLVIMLYVFHRKRNNSRLGNGVLYASVNPEYFSAADVYVPDEWEVAREKITMSRELGQGSFGMVYEGVAKGVVKDEPETRVAIKTVNEAASMRERIEFLNEASVMKEFNCHHVVRLLGVVSQGQPTLVIMELMTRGDLKSYLRSLRPEMENNPVLAPPSLSKMIQMAGEIADGMAYLNANKFVHRDLAARNCMVAEDFTVKIGDFGMTRDIYETDYYRKGGKGLLPVRWMSPESLKDGVFTTYSDVWSFGVVLWEIATLAEQPYQGLSNEQVLRFVMEGGLLDKPDNCPDMLFELMRMCWQYNPKMRPSFLEIISSIKDEMEPGFREVSFYYSEENKLPEPEELDLEPENMESVPLDPSASSSSLPLPDRHSGHKAENGPGPGVLVLRASFDERQPYAHMNGGRKNERALPLPQSSTC

SEQ ID NO: 2000 - protein, 362 aa, Homo sapiens
PAIYKVFPNSAPLEGGTRLTICGWDFGFRRNNKFDLKKTRVLLGNESCTLTLSESTMNTLKCTVGPAMNKHFNMSIIISNGHGTTQYSTFSYVDPVITSISPKYGPMAGGTLLTLTGNYLNSGNSRHISIGGKTCTLKSVSNSILECYTPAQTISTEFAVKLKIDLANRETSIFSYREDPIVYEIHPTKSFISGGSTITGVGKNLNSVSVPRMVINVHEAGRNFTVACQHRSNSEIICCTTPSLQQLNLQLPLKTKAFFMLDGILSKYFDLIYVHNPVFKPFEKPVMISMGNENVLEIKGNDIDPEAVKGEVLKVGNKSCENIHLHSEAVLCTVPNDLLKLNSELNIEWKQAISSTVLGKVI

SEQ ID NO: 2001 - protein, 42 aa, Homo sapiens
CRHFQSCSQCLSAPPFVQCGWCHDKCVRSEECLSGTWTQQIC

SEQ ID NO: 2002 - protein, 212 aa, Homo sapiens
STKKEVFNILQAAYVSKPGAQLARQIGASLNDDILFGVFAQSKPDSAEPMDRSAMCAFPIKYVNDFFNKIVNKNNVRCLQHFYGPNHEHCFNRTLLRNSSGCEARRDEYRTEFTTALQRVDLFMGQFSEVLLTSISTFIKGDLTIANLGTSEGRFMQVVVSRSGPSTPHVNFLLDSHPVSPEVIVEHTLNQNGYTLVITGKKITKIPLNGLG

SEQ ID NO: 2003 - protein, 907 aa, Homo sapiens
ECKEALAKSEMNVNMKYQLPNFTAETPIQNVILHEHHIFLGATNYIYVLNEEDLQKVAEYKTGPVLEHPDCFPCQDCSSKANLSGGVWKDNINMALVVDTYYDDQLISCGSVNRGTCQRHVFPHNHTADIQSEVHCIFSPQIEEPSQCPDCVVSALGAKVLSSVKDRFINFFVGNTINSSYFPDHPLHSISVRRLKETKDGFMFLTDQSYIDVLPEFRDSYPIKYVHAFESNNFIYFLTVQRETLDAQTFHTRIIRFCSINSGLHSYMEMPLECILTEKRKKRSTKKEVFNILQAAYVSKPGAQLARQIGASLNDDILFGVFAQSKPDSAEPMDRSAMCAFPIKYVNDFFNKIVNKNNVRCLQHFYGPNHEHCFNRTLLRNSSGCEARRDEYRTEFTTALQRVDLFMGQFSEVLLTSISTFIKGDLTIANLGTSEGRFMQVVVSRSGPSTPHVNFLLDSHPVSPEVIVEHTLNQNGYTLVITGKKITKIPLNGLGCRHFQSCSQCLSAPPFVQCGWCHDKCVRSEECLSGTWTQQICLPAIYKVFPNSAPLEGGTRLTICGWDFGFRRNNKFDLKKTRVLLGNESCTLTLSESTMNTLKCTVGPAMNKHFNMSIIISNGHGTTQYSTFSYVDPVITSISPKYGPMAGGTLLTLTGNYLNSGNSRHISIGGKTCTLKSVSNSILECYTPAQTISTEFAVKLKIDLANRETSIFSYREDPIVYEIHPTKSFISGGSTITGVGKNLNSVSVPRMVINVHEAGRNFTVACQHRSNSEIICCTTPSLQQLNLQLPLKTKAFFMLDGILSKYFDLIYVHNPVFKPFEKPVMISMGNENVLEIKGNDIDPEAVKGEVLKVGNKSCENIHLHSEAVLCTVPNDLLKLNSELNIEWKQAISSTVLGKVIVQPDQNF

SEQ ID NO: 2004 - protein, 326 aa, Homo sapiens
ASQDLGDELLDDGEDEEDEDEAWKAFNGGWTEMPGILWMEPTQPPDFALAYRPSFPEDREPQIPYPEPTWPPPLSAPRVPYHSSVLSVTRPVVVSATHPTLPSAHQPPVIPATHPALSRDHQIPVIAANYPDLPSAYQPGILSVSHSAQPPAHQPPMISTKYPELFPAHQSPMFPDTRVAGTQTTTHLPGIPPNHAPLVTTLGAQLPPQAPDALVLRTQATQLPIIPTAQPSLTTTSRSPVSPAHQISVPAATQPAALPTLLPSQSPTNQTSPISPTHPHSKAPQIPREDGPSPKLALWLPSPAPTAAPTALGEAGLAEHSQRDDR

SEQ ID NO: 2005 - protein, 116 aa, Homo sapiens
CSPDNGGCEHECVEEVDGHVSCRCTEGFRLAADGRSCEDPCAQAPCEQQCEPGGPQGYSCHCRLGFRPAEDDPHRCVDTDECQIAGVCQQMCVNYVGGFECYCSEGHELEADGISC

SEQ ID NO: 2006 - protein, 55 aa, Homo sapiens
PAVYTTPFHLVSTEFEWLPFGSVAAVQCQAGRGASLLCVKQPEGGVGWSRAGPLC

SEQ ID NO: 2007 - protein, 665 aa, Homo sapiens
WAAEPRAACGPSSCYALFPRRRTFLEAWRACRELGGDLATPRTPEEAQRVDSLVGAGPASRLLWIGLQRQARQCQLQRPLRGFTWTTGDQDTAFTNWAQPASGGPCPAQRCVALEASGEHRWLEGSCTLAVDGYLCQFGFEGACPALQDEAGQAGPAVYTTPFHLVSTEFEWLPFGSVAAVQCQAGRGASLLCVKQPEGGVGWSRAGPLCLGTGCSPDNGGCEHECVEEVDGHVSCRCTEGFRLAADGRSCEDPCAQAPCEQQCEPGGPQGYSCHCRLGFRPAEDDPHRCVDTDECQIAGVCQQMCVNYVGGFECYCSEGHELEADGISCSPAGAMGAQASQDLGDELLDDGEDEEDEDEAWKAFNGGWTEMPGILWMEPTQPPDFALAYRPSFPEDREPQIPYPEPTWPPPLSAPRVPYHSSVLSVTRPVVVSATHPTLPSAHQPPVIPATHPALSRDHQIPVIAANYPDLPSAYQPGILSVSHSAQPPAHQPPMISTKYPELFPAHQSPMFPDTRVAGTQTTTHLPGIPPNHAPLVTTLGAQLPPQAPDALVLRTQATQLPIIPTAQPSLTTTSRSPVSPAHQISVPAATQPAALPTLLPSQSPTNQTSPISPTHPHSKAPQIPREDGPSPKLALWLPSPAPTAAPTALGEAGLAEHSQRDDR

SEQ ID NO: 2008 - protein, 447 aa, Homo sapiens
SDVLHFTSTTTSKNRIIITWHRYRPPDYRDLISFTVYYKEAPFKNVTEYDGQDACGSNSWNMVDVDLPPNKDVEPGILLHGLKPWTQYAVYVKAVTLTMVENDHIRGAKSEILYIRTNASVPSIPLDVLSASNSSSQLIVKWNPPSLPNGNLSYYIVRWQRQPQDGYLYRHNYCSKDKIPIRKYADGTIDIEEVTENPKTEVCGGEKGPCCACPKTEAEKQAEKEEAEYRKVFENFLHNSIFVPRPERKRRDVMQVANTTMSSRSRNTTAADTYNITDPEELETEYPFFESRVDNKERTVISNLRPFTLYRIDIHSCNHEAEKLGCSASNFVFARTMPAEGADDIPGPVTWEPRPENSIFLKWPEPENPNGLILMYEIKYGSQVEDQRECVSRQEYRKYGGAKLNRLNPGNYTARIQATSLSGNGSWTDPVFFYVQAKTGYENFIHL

SEQ ID NO: 2009 - protein, 160 aa, Homo sapiens
KVCEEEKKTKTIDSVTSAQMLQGCTIFKGNLLINIRRGNNIASELENFMGLIEVVTGYVKIRHSHALVSLSFLKNLRLILGEEQLEGNYSFYVLDNQNLQQLWDWDHRNLTIKAGKMYFAFNPKLCVSEIYRMEEVTGTKGRQSKGDINTRNNGERASCE

SEQ ID NO: 2010 - protein, 906 aa, Homo sapiens
EICGPGIDIRNDYQQLKRLENCTVIEGYLHILLISKAEDYRSYRFPKLTVITEYLLLFRVAGLESLGDLFPNLTVIRGWKLFYNYALVIFEMTNLKDIGLYNLRNITRGAIRIEKNADLCYLSTVDWSLILDAVSNNYIVGNKPPKECGDLCPGTMEEKPMCEKTTINNEYNYRCWTTNRCQKMCPSTCGKRACTENNECCHPECLGSCSAPDNDTACVACRHYYYAGVCVPACPPNTYRFEGWRCVDRDFCANILSAESSDSEGFVIHDGECMQECPSGFIRNGSQSMYCIPCEGPCPKVCEEEKKTKTIDSVTSAQMLQGCTIFKGNLLINIRRGNNIASELENFMGLIEVVTGYVKIRHSHALVSLSFLKNLRLILGEEQLEGNYSFYVLDNQNLQQLWDWDHRNLTIKAGKMYFAFNPKLCVSEIYRMEEVTGTKGRQSKGDINTRNNGERASCESDVLHFTSTTTSKNRIIITWHRYRPPDYRDLISFTVYYKEAPFKNVTEYDGQDACGSNSWNMVDVDLPPNKDVEPGILLHGLKPWTQYAVYVKAVTLTMVENDHIRGAKSEILYIRTNASVPSIPLDVLSASNSSSQLIVKWNPPSLPNGNLSYYIVRWQRQPQDGYLYRHNYCSKDKIPIRKYADGTIDIEEVTENPKTEVCGGEKGPCCACPKTEAEKQAEKEEAEYRKVFENFLHNSIFVPRPERKRRDVMQVANTTMSSRSRNTTAADTYNITDPEELETEYPFFESRVDNKERTVISNLRPFTLYRIDIHSCNHEAEKLGCSASNFVFARTMPAEGADDIPGPVTWEPRPENSIFLKWPEPENPNGLILMYEIKYGSQVEDQRECVSRQEYRKYGGAKLNRLNPGNYTARIQATSLSGNGSWTDPVFFYVQAKTGYENFIHL

SEQ ID NO: 2011 - DNA, 4104 bp, Artificial Sequence; identical to SEQ ID NO: 1988
  IGF-1R-1

SEQ ID NO: 2012 - protein, 1367 aa, Artificial Sequence; identical to SEQ ID NO: 1989
  IGF-1R-2

SEQ ID NO: 2013 - DNA, 4104 bp, Artificial Sequence
  IGF-1R-3
atgaagtctggctctggagaagggtccccgacctcgctgtgggggctcctgtttctctccgccgcgctctcgctctggccgacgagtggagaaatctgtgggccgggcatcgacatccgcaacgactatcagcagctgaagcgcctggagaactgcacggtgatcgagggctacctccacatcctgctcatctccaaggccgaggactaccgcagctaccgcttccccaagctcacggtcatcaccgagtacttgctgttgttccgagtggctggcctagagagcctcggagacctgttccccaacctcacggtaatccgcggctggaaactcttctacaactacgcactagtcatctttgagatgaccaatctcaaggatattgggctttacaacctgaggaacattactcggggggccatcaggattgagaaaaatgctgacctctgttacctctccactgtggactggtccctgatcctggatgcagtgtccaataactacattgtggggaataagcccccaaaggaatgcggggacctgtgtccggggaccatggaggagaagccgatgtgcgagaagaccaccatcaacaatgagtacaactaccgctgctggaccacaaaccgctgccagaaaatgtgcccgagtgcctgtgggaagagggcatgcaccgagaacaacgagtgctgccaccccgagtgcctgggcagctgcagcgcgcctgacaacgacacggcctgtgtagcttgccgccactactactacgccggtgtctgcgtgcctgcctgcccgcccaacacctacaggtttgagggctggcgctgtgtggaccgtgacttctgcgccaacatcctcagcgccgagagcagcgactccgagggtttcgtgatccacgacggcgagtgcatgcaggagtgcccctcaggcttcatccgcaacggcagccagagcatgtactgcatcccttgtgaaggtccttgccccaaggtctgtgaggaagaaaagaaaacaaagaccattgattctgttacttctgctcagatgctccaaggatgcaccatcttcaagggcaatttgctcattaacatccgacgggggaataacattgcttcagaactggagaacttcatggggctcatcgaggtggtgacgggctacgtgaagatccgccattcccatgccttggtctccttgtccttcctaaaaaaccttcgcctcatcttaggagaggagcagctagaagggaattactccttctacgtcctcgacaaccagaacttgcagcaactatgggactgggaccaccgcaacctgaccatcaaagcagggaaaatgtactttgctttcaatcccaaattgtgtgtttcggaaatttaccgcatggaggaagtgacggggactaaagggcgccaaagcaaaggggacataaacaccaggaacaacggggaaagagcctcctgtgaaagtgacgtcctgcatttcacctccaccaccacgtggaagaatcgcatcatcataacctggcaccggtaccggccccctgactacagggatctcatcagcttcaccgtttactacaaggaagcaccttttaagaatgtcacggagtatgatgggcaggatgcctgcggctccaacagctggaacatggtggatgtggacctcccgcccaacaaggacgtggagcccggcatcttactgcatgggctgaagccctggactcagtacgccgtttacgtcaaggctgtgaccctcaccatggtggagaacgaccatatccgtggggccaagagtgagatcttgtacattcgcaccaatgcttcagttccttccattcccttggacgttctttcagcatcgaactcctcttctcagttaatcgtgaagtggaaccctccctctctgcccaacggcaacctgagttactacattgtgcgctggcagcggcagcctcaggacggctacctttaccggcacaattactgctccaaagacaaaatccccatcaggaagtatgccgacggcaccattgacattgaggaggtcacagagaacccgaagactgaggtgtgtggtggagagaaagggccttgctgcgcctgccccaaaactgaagctgagaagcaggccgagaaggaggaggctgagtaccgcaaagtctttgagaatttcctgcacaactccatctttgtgcccagacctgaaaggaagcggagagatgtcatgcaagtggccaacaccaccatgtccagccgaagcaggaacaccacggtggcagacacctacaacatcacagatctggaagagctagagacagagtaccctttctttgagagcagagtggataataaggagagaactgtcatttctaaccttcggcctttcacattgtaccgcattgatatccacagctgcaaccacgaggctgagaaactgggctgcagcgcctccaactttgtctttgcaaggactatgcctgcagaaggagcagatgacattcctgggccagtgacctgggagccaaggcctgaaaactccatctttttaaagtggccagaacctgagaatcccaatggattgattctaatgtatgaaataaaatacggatcacaagttgaggatcagcgagaatgtgtgtccagacaggaatacaggaagtatggaggggccaagctaaaccggctaaaccccgggaactacacagcccggattcaggctacatctctctctgggaatgggtcgtggacagatcctgtgttcttctatgtccaggccaaaacaggatatgaaaacttcatccatctgatcatcgctctgcccgtcgctgtcctgttgatcgtgggagggttggtgatcatgctgtacgtcttccatagaaagagaaataacagcaggctggggaatggagtgctgtacgcgtctgtgaacccggagtacttcagcgctgcggatgtgtacgttcctgatgagtgggaggtggctcgggagaagatcaccatgagccgggaacttgggcaggggtcgtttgggatggtctatgaaggagttgccaagggtgtggtgaaagacgaacctgaaaccagagtggccattaaaacagtgaacgaggccgcgagcatgcgtgaaaggatcgagtttctcaacgaggcttctgtgatgaaggagttcaattgtcaccatgtggtgcggttgctgggtgtggtgtcccagggccagccaacgctggtcatcatggaactgatgacgcggggcgatctcaaaagttatctccggtctctgaggccagaaatggagaataatccagtcctagcacctccaagcctaagcaagatgattcagatggctggagagattgcagacggcatggcatacctcaacgccaacaagttcgtccacagagaccttgctgcccggaattgcatggtagccgaggatttcacagtcaaaattggagattttgggatgacgcgagatatctatgagacagactattaccggaaaggagggaaagggctgttgcccgtgcgctggatgtctcccgagtccctcaaggatggagtcttcaccacttactcggacgtctggtccttcggggttgtcctctgggagatcgccacactggccgagcagccctaccagggcttgtccaacgagcaagtccttcgcttcgtcatggagggcggccttctggacaagccagacaactgccccgacatgctgtttgaattgatgcgcatgtgctggcagtacaaccccaagatgaggccttccttcctggagatcatcagcagcatcaaagacgagatggagcctggcttccgggaggtctccttctactacagtgaggagaacaagctgcccgagccggaggagctggacctggagccagagaacatggagagcgtccccctggacccctcggcctcctcgtcctccctgccactgcccgacagacactcaggacacaaggccgagaacggccccggccctggagtgctggtgctccgcgccagcttcgatgagagacagccttacgcacacatgaacggtggccgcaagaacgagcgggccttgccgctgccccagtcttcgacctgctga

SEQ ID NO: 2014 - protein, 1367 aa, Artificial Sequence; identical to SEQ ID NO: 1999
  IGF-1R-4

SEQ ID NO: 2015 - protein, 130 aa, Artificial Sequence
  IGF1R2-H
EVQLVQSGAEVKKPGSSVKVSCKASGGTFSSYAISWVRQAPGQGLEWMGGIIPIFGTANYAQKFQGRVTITADKSTSTAYMELSSLRSEDTAVYYCARAPLRFLEWSTQDHYYYYYMDVWGKGTTVTVSS

SEQ ID NO: 2016 - protein, 5 aa, Artificial Sequence
  IGF1R2-HCDR1
SYAIS

SEQ ID NO: 2017 - protein, 17 aa, Artificial Sequence
  IGF1R2-HCDR2
GIIPIFGTANYAQKFQG

SEQ ID NO: 2018 - protein, 21 aa, Artificial Sequence
  IGF1R2-HCDR3
APLRFLEWSTQDHYYYYYMDV

SEQ ID NO: 2019 - DNA, 390 bp, Artificial Sequence
  IGF1R2-H
gaggtgcaactagtccagagcggagcggaggtgaagaaacctggatccagcgtgaaagtgagctgtaaggctagcggaggcacattctcctcgtatgccattagctgggttagacaagcacctggacaaggactggagtggatgggagggataatcccaatcttcggaactgccaactacgcacagaagttccaaggacgggtcaccatcactgcggataagtccacctcgactgcctacatggagctcagtagcttacggagcgaagacacagccgtatactattgcgcacgagcacccctaagattcctggagtggagcacgcaggatcactattactattactacatggacgtgtggggaaagggaacgactgtcaccgtttcaagc

SEQ ID NO: 2020 - protein, 108 aa, Artificial Sequence
  IGF1R2-L
SSELTQDPAVSVALGQTVRITCQGDSLRSYYATWYQQKPGQAPILVIYGENKRPSGIPDRFSGSSSGNTASLTITGAQAEDEADYYCKSRDGSGQHLVFGGGTKLTVL

SEQ ID NO: 2021 - protein, 11 aa, Artificial Sequence
  IGF1R2-LCDR1
QGDSLRSYYAT

SEQ ID NO: 2022 - protein, 7 aa, Artificial Sequence
  IGF1R2-LCDR2
GENKRPS

SEQ ID NO: 2023 - protein, 11 aa, Artificial Sequence
  IGF1R2-LCDR3
KSRDGSGQHLV

SEQ ID NO: 2024 - DNA, 324 bp, Artificial Sequence
  IGF1R2-L
agctcggaattgacccaggatcctgctgtatccgtcgctctcggacaaaccgtgcgcataacatgtcaaggggactccctgaggagctactacgccacatggtaccagcaaaaacccggacaagctccaatcctggtgatttatggcgaaaacaagcgtccctcagggatcccagacaggtttagcggaagttcgagcggcaatactgccagtctgacgattaccggagctcaagctgaggatgaagccgactactattgcaaatcacgcgacggaagcggccagcacctggtgtttggtggcgggacaaagctgaccgttttg

SEQ ID NO: 2025 - protein, 253 aa, Artificial Sequence
  IGF1R2-HL
EVQLVQSGAEVKKPGSSVKVSCKASGGTFSSYAISWVRQAPGQGLEWMGGIIPIFGTANYAQKFQGRVTITADKSTSTAYMELSSLRSEDTAVYYCARAPLRFLEWSTQDHYYYYYMDVWGKGTTVTVSSGGGGSGGGGSGGGGSSSELTQDPAVSVALGQTVRITCQGDSLRSYYATWYQQKPGQAPILVIYGENKRPSGIPDRFSGSSSGNTASLTITGAQAEDEADYYCKSRDGSGQHLVFGGGTKLTVL

SEQ ID NO: 2026 - DNA, 759 bp, Artificial Sequence
  IGF1R2-HL
gaggtgcaactagtccagagcggagcggaggtgaagaaacctggatccagcgtgaaagtgagctgtaaggctagcggaggcacattctcctcgtatgccattagctgggttagacaagcacctggacaaggactggagtggatgggagggataatcccaatcttcggaactgccaactacgcacagaagttccaaggacgggtcaccatcactgcggataagtccacctcgactgcctacatggagctcagtagcttacggagcgaagacacagccgtatactattgcgcacgagcacccctaagattcctggagtggagcacgcaggatcactattactattactacatggacgtgtggggaaagggaacgactgtcaccgtttcaagcggtggaggtggaagtggtggaggagggagcggtgggggaggatcaagctcggaattgacccaggatcctgctgtatccgtcgctctcggacaaaccgtgcgcataacatgtcaaggggactccctgaggagctactacgccacatggtaccagcaaaaacccggacaagctccaatcctggtgatttatggcgaaaacaagcgtccctcagggatcccagacaggtttagcggaagttcgagcggcaatactgccagtctgacgattaccggagctcaagctgaggatgaagccgactactattgcaaatcacgcgacggaagcggccagcacctggtgtttggtggcgggacaaagctgaccgttttg

SEQ ID NO: 2027 - protein, 508 aa, Artificial Sequence
  IGF1R2HLxI2CHL
EVQLVQSGAEVKKPGSSVKVSCKASGGTFSSYAISWVRQAPGQGLEWMGGIIPIFGTANYAQKFQGRVTITADKSTSTAYMELSSLRSEDTAVYYCARAPLRFLEWSTQDHYYYYYMDVWGKGTTVTVSSGGGGSGGGGSGGGGSSSELTQDPAVSVALGQTVRITCQGDSLRSYYATWYQQKPGQAPILVIYGENKRPSGIPDRFSGSSSGNTASLTITGAQAEDEADYYCKSRDGSGQHLVFGGGTKLTVLSGGGGSEVQLVESGGGLVQPGGSLKLSCAASGFTFNKYAMNWVRQAPGKGLEWVARIRSKYNNYATYYADSVKDRFTISRDDSKNTAYLQMNNLKTEDTAVYYCVRHGNFGNSYISYWAYWGQGTLVTVSSGGGGSGGGGSGGGGSQTVVTQEPSLTVSPGGTVTLTCGSSTGAVTSGNYPNWVQQKPGQAPRGLIGGTKFLAPGTPARFSGSLLGGKAALTLSGVQPEDEAEYYCVLWYSNRWVFGGGTKLTVL

SEQ ID NO: 2028 - DNA, 1524 bp, Artificial Sequence
  IGF1R2HLxI2CHL
gaggtgcaactagtccagagcggagcggaggtgaagaaacctggatccagcgtgaaagtgagctgtaaggctagcggaggcacattctcctcgtatgccattagctgggttagacaagcacctggacaaggactggagtggatgggagggataatcccaatcttcggaactgccaactacgcacagaagttccaaggacgggtcaccatcactgcggataagtccacctcgactgcctacatggagctcagtagcttacggagcgaagacacagccgtatactattgcgcacgagcacccctaagattcctggagtggagcacgcaggatcactattactattactacatggacgtgtggggaaagggaacgactgtcaccgtttcaagcggtggaggtggaagtggtggaggagggagcggtgggggaggatcaagctcggaattgacccaggatcctgctgtatccgtcgctctcggacaaaccgtgcgcataacatgtcaaggggactccctgaggagctactacgccacatggtaccagcaaaaacccggacaagctccaatcctggtgatttatggcgaaaacaagcgtccctcagggatcccagacaggtttagcggaagttcgagcggcaatactgccagtctgacgattaccggagctcaagctgaggatgaagccgactactattgcaaatcacgcgacggaagcggccagcacctggtgtttggtggcgggacaaagctgaccgttttgtccggaggtggtggatccgaggtgcagctggtcgagtctggaggaggattggtgcagcctggagggtcattgaaactctcatgtgcagcctctggattcaccttcaataagtacgccatgaactgggtccgccaggctccaggaaagggtttggaatgggttgctcgcataagaagtaaatataataattatgcaacatattatgccgattcagtgaaagacaggttcaccatctccagagatgattcaaaaaacactgcctatctacaaatgaacaacttgaagactgaggacactgccgtgtactactgtgtgagacatgggaacttcggtaatagctacatatcctactgggcttactggggccaagggactctggtcaccgtctcctcaggtggtggtggttctggcggcggcggctccggtggtggtggttctcagactgttgtgactcaggaaccttcactcaccgtatcacctggtggaacagtcacactcacttgtggctcctcgactggggctgttacatctggcaactacccaaactgggtccaacaaaaaccaggtcaggcaccccgtggtctaataggtgggactaagttcctcgcccccggtactcctgccagattctcaggctccctgcttggaggcaaggctgccctcaccctctcaggggtacagccagaggatgaggcagaatattactgtgttctatggtacagcaaccgctgggtgttcggtggaggaaccaaactgactgtccta

SEQ ID NO: 2029 - protein, 118 aa, Artificial Sequence
  IGF1R7-H
QVELVESGGGVVQPGRSQRLSCAASGFTFSSYGMHWVRQAPGKGLEWVAIIWFDGSSTYYADSVRGRFTISRDNSKNTLYLQMNSLRAEDTAVYFCARELGRRYFDLWGRGTLVSVSS

SEQ ID NO: 2030 - protein, 5 aa, Artificial Sequence
  IGF1R7-HCDR1
SYGMH

SEQ ID NO: 2031 - protein, 17 aa, Artificial Sequence
  IGF1R7-HCDR2
IIWFDGSSTYYADSVRG

SEQ ID NO: 2032 - protein, 9 aa, Artificial Sequence
  IGF1R7-HCDR3
ELGRRYFDL

SEQ ID NO: 2033 - DNA, 354 bp, Artificial Sequence
  IGF1R7-H
caggtcgaattggtggaaagcgggggaggcgtcgttcagcctggtaggagccagaggcttagctgtgctgcctccggtttcaccttctctagctacggaatgcactgggtgagacaggcacccggaaaaggactggaatgggtggccatcatctggttcgacggctcttccacctactatgccgatagcgtgagaggacgcttcaccatctcccgtgacaactccaagaacaccctgtacctccagatgaatagcctgcgagctgaggacactgccgtgtacttttgtgcacgggagctgggacgtaggtactttgatctgtggggaagaggcacactggttagcgttagctcc

SEQ ID NO: 2034 - protein, 108 aa, Artificial Sequence
  IGF1R7-L
EIVLTQSPATLSLSPGERATLSCRASQSVSSYLAWYQQKPGQAPRLLIYDASKRAYGIPARFSGSGSGTDFTLTISSLEPEDFAVYYCQQRSKWPPWTFGQGTKVESK

SEQ ID NO: 2035 - protein, 11 aa, Artificial Sequence
  IGF1R7-LCDR1
RASQSVSSYLA

SEQ ID NO: 2036 - protein, 7 aa, Artificial Sequence
  IGF1R7-LCDR2
DASKRAY

SEQ ID NO: 2037 - protein, 8 aa, Artificial Sequence
  IGF1R7-LCDR3
QQRSKWPP

SEQ ID NO: 2038 - DNA, 324 bp, Artificial Sequence
  IGF1R7-L
gaaatcgtgctcacccagagccctgccacattgagcctttcacctggcgagcgagctacattgtcatgccgagctagccagagcgtgagctcttacctggcatggtatcagcagaaacctgggcaggctccacgactgctcatctatgacgcctccaagcgagcctatgggattcctgcaaggtttagcggaagcggaagcggaaccgatttcaccctgactatctcctcactcgagcctgaggactttgccgtgtattactgccagcagcggagcaagtggcctccatggacattcggccagggtaccaaagtggagagcaag

SEQ ID NO: 2039 - protein, 241 aa, Artificial Sequence
  IGF1R7-HL
QVELVESGGGVVQPGRSQRLSCAASGFTFSSYGMHWVRQAPGKGLEWVAIIWFDGSSTYYADSVRGRFTISRDNSKNTLYLQMNSLRAEDTAVYFCARELGRRYFDLWGRGTLVSVSSGGGGSGGGGSGGGGSEIVLTQSPATLSLSPGERATLSCRASQSVSSYLAWYQQKPGQAPRLLIYDASKRAYGIPARFSGSGSGTDFTLTISSLEPEDFAVYYCQQRSKWPPWTFGQGTKVESK

SEQ ID NO: 2040 - DNA, 723 bp, Artificial Sequence
  IGF1R7-HL
caggtcgaattggtggaaagcgggggaggcgtcgttcagcctggtaggagccagaggcttagctgtgctgcctccggtttcaccttctctagctacggaatgcactgggtgagacaggcacccggaaaaggactggaatgggtggccatcatctggttcgacggctcttccacctactatgccgatagcgtgagaggacgcttcaccatctcccgtgacaactccaagaacaccctgtacctccagatgaatagcctgcgagctgaggacactgccgtgtacttttgtgcacgggagctgggacgtaggtactttgatctgtggggaagaggcacactggttagcgttagctccggcggagggggaagcggaggcggaggtagcgggggaggtggaagcgaaatcgtgctcacccagagccctgccacattgagcctttcacctggcgagcgagctacattgtcatgccgagctagccagagcgtgagctcttacctggcatggtatcagcagaaacctgggcaggctccacgactgctcatctatgacgcctccaagcgagcctatgggattcctgcaaggtttagcggaagcggaagcggaaccgatttcaccctgactatctcctcactcgagcctgaggactttgccgtgtattactgccagcagcggagcaagtggcctccatggacattcggccagggtaccaaagtggagagcaag

SEQ ID NO: 2041 - protein, 496 aa, Artificial Sequence
  IGF1R7HLxI2CHL
QVELVESGGGVVQPGRSQRLSCAASGFTFSSYGMHWVRQAPGKGLEWVAIIWFDGSSTYYADSVRGRFTISRDNSKNTLYLQMNSLRAEDTAVYFCARELGRRYFDLWGRGTLVSVSSGGGGSGGGGSGGGGSEIVLTQSPATLSLSPGERATLSCRASQSVSSYLAWYQQKPGQAPRLLIYDASKRAYGIPARFSGSGSGTDFTLTISSLEPEDFAVYYCQQRSKWPPWTFGQGTKVESKSGGGGSEVQLVESGGGLVQPGGSLKLSCAASGFTFNKYAMNWVRQAPGKGLEWVARIRSKYNNYATYYADSVKDRFTISRDDSKNTAYLQMNNLKTEDTAVYYCVRHGNFGNSYISYWAYWGQGTLVTVSSGGGGSGGGGSGGGGSQTVVTQEPSLTVSPGGTVTLTCGSSTGAVTSGNYPNWVQQKPGQAPRGLIGGTKFLAPGTPARFSGSLLGGKAALTLSGVQPEDEAEYYCVLWYSNRWVFGGGTKLTVL

SEQ ID NO: 2042 - DNA, 1488 bp, Artificial Sequence
  IGF1R7HLxI2CHL
caggtcgaattggtggaaagcgggggaggcgtcgttcagcctggtaggagccagaggcttagctgtgctgcctccggtttcaccttctctagctacggaatgcactgggtgagacaggcacccggaaaaggactggaatgggtggccatcatctggttcgacggctcttccacctactatgccgatagcgtgagaggacgcttcaccatctcccgtgacaactccaagaacaccctgtacctccagatgaatagcctgcgagctgaggacactgccgtgtacttttgtgcacgggagctgggacgtaggtactttgatctgtggggaagaggcacactggttagcgttagctccggcggagggggaagcggaggcggaggtagcgggggaggtggaagcgaaatcgtgctcacccagagccctgccacattgagcctttcacctggcgagcgagctacattgtcatgccgagctagccagagcgtgagctcttacctggcatggtatcagcagaaacctgggcaggctccacgactgctcatctatgacgcctccaagcgagcctatgggattcctgcaaggtttagcggaagcggaagcggaaccgatttcaccctgactatctcctcactcgagcctgaggactttgccgtgtattactgccagcagcggagcaagtggcctccatggacattcggccagggtaccaaagtggagagcaagtccggaggtggtggatccgaggtgcagctggtcgagtctggaggaggattggtgcagcctggagggtcattgaaactctcatgtgcagcctctggattcaccttcaataagtacgccatgaactgggtccgccaggctccaggaaagggtttggaatgggttgctcgcataagaagtaaatataataattatgcaacatattatgccgattcagtgaaagacaggttcaccatctccagagatgattcaaaaaacactgcctatctacaaatgaacaacttgaagactgaggacactgccgtgtactactgtgtgagacatgggaacttcggtaatagctacatatcctactgggcttactggggccaagggactctggtcaccgtctcctcaggtggtggtggttctggcggcggcggctccggtggtggtggttctcagactgttgtgactcaggaaccttcactcaccgtatcacctggtggaacagtcacactcacttgtggctcctcgactggggctgttacatctggcaactacccaaactgggtccaacaaaaaccaggtcaggcaccccgtggtctaataggtgggactaagttcctcgcccccggtactcctgccagattctcaggctccctgcttggaggcaaggctgccctcaccctctcaggggtacagccagaggatgaggcagaatattactgtgttctatggtacagcaaccgctgggtgttcggtggaggaaccaaactgactgtccta

SEQ ID NO: 2043 - protein, 120 aa, Artificial Sequence
  IGF1R9-H
EVQLLESGGGLVQPGGSLRLSCAASGFTFSIYRMQWVRQAPGKGLEWVSGISPSGGTTWYADSVKGRFTISRDNSKNTLYLQMNSLRAEDTAVYYCARWSGGSGYAFDIWGQGTMVTVSS

SEQ ID NO: 2044 - protein, 5 aa, Artificial Sequence
  IGF1R9-HCDR1
IYRMQ

SEQ ID NO: 2045 - protein, 17 aa, Artificial Sequence
  IGF1R9-HCDR2
GISPSGGTTWYADSVKG

SEQ ID NO: 2046 - protein, 11 aa, Artificial Sequence
  IGF1R9-HCDR3
WSGGSGYAFDI

SEQ ID NO: 2047 - DNA, 360 bp, Artificial Sequence
  IGF1R9-H
gaagttcagctgctcgagagcggaggtggacttgtgcagcctgggggatcactgagattgtcatgcgcagctagcggctttaccttctccatctatcgcatgcagtgggttcgacaggcacccggaaagggattggaatgggtctccggcattagccctagcgggggaacaacctggtatgccgatagcgtgaagggcaggttcaccatctctagggacaacagcaaaaatactctgtacctgcagatgaactccctgcgtgccgaggatactgccgtctactactgtgctcgatggtccggtggctccggctatgccttcgatatctggggacagggtacaatggtgactgtgagtagc

SEQ ID NO: 2048 - protein, 107 aa, Artificial Sequence
  IGF1R9-L
DIQMTQSPLSLSASVGDRVTITCQASRDIRNYLNWYQQKPGKAPKLLIYDASSLQTGVPSRFGGSGSGTDFSFTIGSLQPEDIATYYCQQFDSLPHTFGQGTKLEIK

SEQ ID NO: 2049 - protein, 11 aa, Artificial Sequence
  IGF1R9-LCDR1
QASRDIRNYLN

SEQ ID NO: 2050 - protein, 7 aa, Artificial Sequence
  IGF1R9-LCDR2
DASSLQT

SEQ ID NO: 2051 - protein, 9 aa, Artificial Sequence
  IGF1R9-LCDR3
QQFDSLPHT

SEQ ID NO: 2052 - DNA, 321 bp, Artificial Sequence
  IGF1R9-L
gacattcagatgacccagagcccattgtcactgtcagcttccgtgggcgatcgggtgaccattacatgccaggcttcacgcgacatcaggaactacctgaactggtatcagcagaagcctggcaaagcccccaagctccttatctacgacgcaagctcactgcagactggtgttccctcaagattcggtggaagcgggagtggcaccgactttagctttaccatcggctctctgcagcctgaggacatcgccacatattactgccagcagtttgactccctgccacacacatttggccagggcaccaaactggagatcaag

SEQ ID NO: 2053 - protein, 242 aa, Artificial Sequence
  IGF1R9-HL
EVQLLESGGGLVQPGGSLRLSCAASGFTFSIYRMQWVRQAPGKGLEWVSGISPSGGTTWYADSVKGRFTISRDNSKNTLYLQMNSLRAEDTAVYYCARWSGGSGYAFDIWGQGTMVTVSSGGGGSGGGGSGGGGSDIQMTQSPLSLSASVGDRVTITCQASRDIRNYLNWYQQKPGKAPKLLIYDASSLQTGVPSRFGGSGSGTDFSFTIGSLQPEDIATYYCQQFDSLPHTFGQGTKLEIK

SEQ ID NO: 2054 - DNA, 726 bp, Artificial Sequence
  IGF1R9-HL
gaagttcagctgctcgagagcggaggtggacttgtgcagcctgggggatcactgagattgtcatgcgcagctagcggctttaccttctccatctatcgcatgcagtgggttcgacaggcacccggaaagggattggaatgggtctccggcattagccctagcgggggaacaacctggtatgccgatagcgtgaagggcaggttcaccatctctagggacaacagcaaaaatactctgtacctgcagatgaactccctgcgtgccgaggatactgccgtctactactgtgctcgatggtccggtggctccggctatgccttcgatatctggggacagggtacaatggtgactgtgagtagcggagggggaggtagcggaggaggtggaagtggcggaggtggaagcgacattcagatgacccagagcccattgtcactgtcagcttccgtgggcgatcgggtgaccattacatgccaggcttcacgcgacatcaggaactacctgaactggtatcagcagaagcctggcaaagcccccaagctccttatctacgacgcaagctcactgcagactggtgttccctcaagattcggtggaagcgggagtggcaccgactttagctttaccatcggctctctgcagcctgaggacatcgccacatattactgccagcagtttgactccctgccacacacatttggccagggcaccaaactggagatcaag

SEQ ID NO: 2055 - protein, 497 aa, Artificial Sequence
  IGF1R9HLxI2CHL
EVQLLESGGGLVQPGGSLRLSCAASGFTFSIYRMQWVRQAPGKGLEWVSGISPSGGTTWYADSVKGRFTISRDNSKNTLYLQMNSLRAEDTAVYYCARWSGGSGYAFDIWGQGTMVTVSSGGGGSGGGGSGGGGSDIQMTQSPLSLSASVGDRVTITCQASRDIRNYLNWYQQKPGKAPKLLIYDASSLQTGVPSRFGGSGSGTDFSFTIGSLQPEDIATYYCQQFDSLPHTFGQGTKLEIKSGGGGSEVQLVESGGGLVQPGGSLKLSCAASGFTFNKYAMNWVRQAPGKGLEWVARIRSKYNNYATYYADSVKDRFTISRDDSKNTAYLQMNNLKTEDTAVYYCVRHGNFGNSYISYWAYWGQGTLVTVSSGGGGSGGGGSGGGGSQTVVTQEPSLTVSPGGTVTLTCGSSTGAVTSGNYPNWVQQKPGQAPRGLIGGTKFLAPGTPARFSGSLLGGKAALTLSGVQPEDEAEYYCVLWYSNRWVFGGGTKLTVL

SEQ ID NO: 2056 - DNA, 1491 bp, Artificial Sequence
  IGF1R9HLxI2CHL
gaagttcagctgctcgagagcggaggtggacttgtgcagcctgggggatcactgagattgtcatgcgcagctagcggctttaccttctccatctatcgcatgcagtgggttcgacaggcacccggaaagggattggaatgggtctccggcattagccctagcgggggaacaacctggtatgccgatagcgtgaagggcaggttcaccatctctagggacaacagcaaaaatactctgtacctgcagatgaactccctgcgtgccgaggatactgccgtctactactgtgctcgatggtccggtggctccggctatgccttcgatatctggggacagggtacaatggtgactgtgagtagcggagggggaggtagcggaggaggtggaagtggcggaggtggaagcgacattcagatgacccagagcccattgtcactgtcagcttccgtgggcgatcgggtgaccattacatgccaggcttcacgcgacatcaggaactacctgaactggtatcagcagaagcctggcaaagcccccaagctccttatctacgacgcaagctcactgcagactggtgttccctcaagattcggtggaagcgggagtggcaccgactttagctttaccatcggctctctgcagcctgaggacatcgccacatattactgccagcagtttgactccctgccacacacatttggccagggcaccaaactggagatcaagtccggaggtggtggatccgaggtgcagctggtcgagtctggaggaggattggtgcagcctggagggtcattgaaactctcatgtgcagcctctggattcaccttcaataagtacgccatgaactgggtccgccaggctccaggaaagggtttggaatgggttgctcgcataagaagtaaatataataattatgcaacatattatgccgattcagtgaaagacaggttcaccatctccagagatgattcaaaaaacactgcctatctacaaatgaacaacttgaagactgaggacactgccgtgtactactgtgtgagacatgggaacttcggtaatagctacatatcctactgggcttactggggccaagggactctggtcaccgtctcctcaggtggtggtggttctggcggcggcggctccggtggtggtggttctcagactgttgtgactcaggaaccttcactcaccgtatcacctggtggaacagtcacactcacttgtggctcctcgactggggctgttacatctggcaactacccaaactgggtccaacaaaaaccaggtcaggcaccccgtggtctaataggtgggactaagttcctcgcccccggtactcctgccagattctcaggctccctgcttggaggcaaggctgccctcaccctctcaggggtacagccagaggatgaggcagaatattactgtgttctatggtacagcaaccgctgggtgttcggtggaggaaccaaactgactgtccta

SEQ ID NO: 2057 - protein, 121 aa, Artificial Sequence
  IGF1R10-H
EVQLLESGGGLVQPGGSLRLSCAASGFTFSNYHMAWVRQAPGKGLEWVSVISPTGGRTTYADSVKGRFTISRDNSKNTLYLQMNSLRAEDTATYYCARAGYSYGYGYFDYWGQGTLVTVSS

SEQ ID NO: 2058 - protein, 5 aa, Artificial Sequence
  IGF1R10-HCDR1
NYHMA

SEQ ID NO: 2059 - protein, 17 aa, Artificial Sequence
  IGF1R10-HCDR2
VISPTGGRTTYADSVKG

SEQ ID NO: 2060 - protein, 12 aa, Artificial Sequence
  IGF1R10-HCDR2
AGYSYGYGYFDY

SEQ ID NO: 2061 - DNA, 363 bp, Artificial Sequence
  IGF1R10-H
gaagtgcagctcttggagagcggagggggacttgtgcagcctggcggatccttgagactttcttgcgctgcctccggtttcaccttctcaaattaccacatggcctgggtgagacaggctcctggaaaagggctcgaatgggtttccgtgattagcccaaccggagggaggaccacatatgccgatagcgtcaaggggaggtttacaatcagccgtgacaactccaagaacaccctgtacctccagatgaactcactgcgagccgaggatactgcaacctactactgcgctcgagccggatactcatacggctatggctacttcgactactggggacagggaacactggtgaccgttagtagc

SEQ ID NO: 2062 - protein, 108 aa, Artificial Sequence
  IGF1R10-L
DIQMTQFPATLSVSPGERATLSCRASQSVMRNLAWYQQKPGQPPRLLIYGASKRATGIPARFSGSGSGTAFTLTISNLEPEDFAVYYCHQRSTWPLGTFGPGTKLEAK

SEQ ID NO: 2063 - protein, 11 aa, Artificial Sequence
  IGF1R10-LCDR1
RASQSVMRNLA

SEQ ID NO: 2064 - protein, 7 aa, Artificial Sequence
  IGF1R10-LCDR2
GASKRAT

SEQ ID NO: 2065 - protein, 10 aa, Artificial Sequence
  IGF1R10-LCDR3
HQRSTWPLGT

SEQ ID NO: 2066 - DNA, 324 bp, Artificial Sequence
  IGF1R10-L
gatattcagatgacccagttccctgcaaccttgagcgtgtcacctggcgaaagagccacactgtcttgccgagcaagccagagcgtgatgcggaacctggcatggtaccagcagaaacctggccagcctccacgactgctgatctatggagctagcaaaagagccaccggaatccccgctaggtttagcggaagcggaagcggaactgcctttaccctgaccatctccaatctcgagcctgaggactttgccgtctactactgtcaccagcgtagcacttggcctctggggacatttggacctggcacaaagctggaagctaag

SEQ ID NO: 2067 - protein, 244 aa, Artificial Sequence
  IGF1R10-HL
EVQLLESGGGLVQPGGSLRLSCAASGFTFSNYHMAWVRQAPGKGLEWVSVISPTGGRTTYADSVKGRFTISRDNSKNTLYLQMNSLRAEDTATYYCARAGYSYGYGYFDYWGQGTLVTVSSGGGGSGGGGSGGGGSDIQMTQFPATLSVSPGERATLSCRASQSVMRNLAWYQQKPGQPPRLLIYGASKRATGIPARFSGSGSGTAFTLTISNLEPEDFAVYYCHQRSTWPLGTFGPGTKLEAK

SEQ ID NO: 2068 - DNA, 732 bp, Artificial Sequence
  IGF1R10-HL
gaagtgcagctcttggagagcggagggggacttgtgcagcctggcggatccttgagactttcttgcgctgcctccggtttcaccttctcaaattaccacatggcctgggtgagacaggctcctggaaaagggctcgaatgggtttccgtgattagcccaaccggagggaggaccacatatgccgatagcgtcaaggggaggtttacaatcagccgtgacaactccaagaacaccctgtacctccagatgaactcactgcgagccgaggatactgcaacctactactgcgctcgagccggatactcatacggctatggctacttcgactactggggacagggaacactggtgaccgttagtagcggagggggaggttctggcggaggtggaagcgggggcgggggaagcgatattcagatgacccagttccctgcaaccttgagcgtgtcacctggcgaaagagccacactgtcttgccgagcaagccagagcgtgatgcggaacctggcatggtaccagcagaaacctggccagcctccacgactgctgatctatggagctagcaaaagagccaccggaatccccgctaggtttagcggaagcggaagcggaactgcctttaccctgaccatctccaatctcgagcctgaggactttgccgtctactactgtcaccagcgtagcacttggcctctggggacatttggacctggcacaaagctggaagctaag

SEQ ID NO: 2069 - protein, 499 aa, Artificial Sequence
  IGF1R10HLxI2CHL
EVQLLESGGGLVQPGGSLRLSCAASGFTFSNYHMAWVRQAPGKGLEWVSVISPTGGRTTYADSVKGRFTISRDNSKNTLYLQMNSLRAEDTATYYCARAGYSYGYGYFDYWGQGTLVTVSSGGGGSGGGGSGGGGSDIQMTQFPATLSVSPGERATLSCRASQSVMRNLAWYQQKPGQPPRLLIYGASKRATGIPARFSGSGSGTAFTLTISNLEPEDFAVYYCHQRSTWPLGTFGPGTKLEAKSGGGGSEVQLVESGGGLVQPGGSLKLSCAASGFTFNKYAMNWVRQAPGKGLEWVARIRSKYNNYATYYADSVKDRFTISRDDSKNTAYLQMNNLKTEDTAVYYCVRHGNFGNSYISYWAYWGQGTLVTVSSGGGGSGGGGSGGGGSQTVVTQEPSLTVSPGGTVTLTCGSSTGAVTSGNYPNWVQQKPGQAPRGLIGGTKFLAPGTPARFSGSLLGGKAALTLSGVQPEDEAEYYCVLWYSNRWVFGGGTKLTVL

SEQ ID NO: 2070 - DNA, 1497 bp, Artificial Sequence
  IGF1R10HLxI2CHL
gaagtgcagctcttggagagcggagggggacttgtgcagcctggcggatccttgagactttcttgcgctgcctccggtttcaccttctcaaattaccacatggcctgggtgagacaggctcctggaaaagggctcgaatgggtttccgtgattagcccaaccggagggaggaccacatatgccgatagcgtcaaggggaggtttacaatcagccgtgacaactccaagaacaccctgtacctccagatgaactcactgcgagccgaggatactgcaacctactactgcgctcgagccggatactcatacggctatggctacttcgactactggggacagggaacactggtgaccgttagtagcggagggggaggttctggcggaggtggaagcgggggcgggggaagcgatattcagatgacccagttccctgcaaccttgagcgtgtcacctggcgaaagagccacactgtcttgccgagcaagccagagcgtgatgcggaacctggcatggtaccagcagaaacctggccagcctccacgactgctgatctatggagctagcaaaagagccaccggaatccccgctaggtttagcggaagcggaagcggaactgcctttaccctgaccatctccaatctcgagcctgaggactttgccgtctactactgtcaccagcgtagcacttggcctctggggacatttggacctggcacaaagctggaagctaagtccggaggtggtggatccgaggtgcagctggtcgagtctggaggaggattggtgcagcctggagggtcattgaaactctcatgtgcagcctctggattcaccttcaataagtacgccatgaactgggtccgccaggctccaggaaagggtttggaatgggttgctcgcataagaagtaaatataataattatgcaacatattatgccgattcagtgaaagacaggttcaccatctccagagatgattcaaaaaacactgcctatctacaaatgaacaacttgaagactgaggacactgccgtgtactactgtgtgagacatgggaacttcggtaatagctacatatcctactgggcttactggggccaagggactctggtcaccgtctcctcaggtggtggtggttctggcggcggcggctccggtggtggtggttctcagactgttgtgactcaggaaccttcactcaccgtatcacctggtggaacagtcacactcacttgtggctcctcgactggggctgttacatctggcaactacccaaactgggtccaacaaaaaccaggtcaggcaccccgtggtctaataggtgggactaagttcctcgcccccggtactcctgccagattctcaggctccctgcttggaggcaaggctgccctcaccctctcaggggtacagccagaggatgaggcagaatattactgtgttctatggtacagcaaccgctgggtgttcggtggaggaaccaaactgactgtccta

SEQ ID NO: 2071 - protein, 119 aa, Artificial Sequence
  IGF1R11-H
EVQLLESGGGLVQPGGSLRLSCAASGFTFSKYMMSWVRQAPGKGLEWVSYISPSGGLTWYADSVKGRFTISRDNSKNTLYLQMNSLREADTAVYYCARDGARGYGMDVWGQGTTVTVSS

SEQ ID NO: 2072 - protein, 5 aa, Artificial Sequence
  IGF1R11-HCDR1
KYMMS

SEQ ID NO: 2073 - protein, 17 aa, Artificial Sequence
  IGF1R11-HCDR2
YISPSGGLTWYADSVKG

SEQ ID NO: 2074 - protein, 10 aa, Artificial Sequence
  IGF1R11-HCDR3
DGARGYGMDV

SEQ ID NO: 2075 - DNA, 357 bp, Artificial Sequence
  IGF1R11-H
gaggtccagctgttggaaagcggaggcggactcgtgcagcctggcggatctttgcgactttcctgtgctgcctccggtttcaccttctccaagtacatgatgagctgggtgagacaggcaccaggcaaaggactggaatgggtgagctacattagcccatctggcggactgacatggtatgccgatagtgttaaggggaggttcaccatcagtagggacaatagcaagaacaccctgtacctgcagatgaactcactgcgagaggctgatactgccgtgtattactgcgcaagggatggagctagaggctatggaatggacgtgtggggacagggaacaaccgtcaccgtgagcagt

SEQ ID NO: 2076 - protein, 109 aa, Artificial Sequence
  IGF1R11-L
DIQMTQSPATLSLSPGERATLSCRASQSVSSYLAWYQQKPGQAPRLLIYDASNRATGIPARFSGSGSGTDFTLTISSLEPEDFAVYYCQQRSNWPPEVTFGPGTKVDIK

SEQ ID NO: 2077 - protein, 11 aa, Artificial Sequence
  IGF1R11-LCDR1
RASQSVSSYLA

SEQ ID NO: 2078 - protein, 7 aa, Artificial Sequence
  IGF1R11-LCDR2
DASNRAT

SEQ ID NO: 2079 - protein, 11 aa, Artificial Sequence
  IGF1R11-LCDR3
QQRSNWPPEVT

SEQ ID NO: 2080 - protein, 327 aa, Artificial Sequence
  IGF1R11-L
GACATTCAGATGACACAGAGCCCTGCCACACTGAGCCTGTCACCTGGAGAGCGAGCTACATTGAGCTGTCGCGCTAGCCAGAGCGTGTCTTCCTATCTTGCCTGGTACCAGCAGAAACCTGGACAGGCACCAAGACTCCTGATCTACGACGCCTCCAACCGTGCAACTGGCATCCCTGCTCGCTTTTCTGGCTCTGGCTCTGGGACCGACTTTACCTTGACCATCTCCTCACTGGAACCCGAGGATTTTGCCGTGTACTATTGCCAGCAGCGGAGCAATTGGCCTCCCGAAGTCACTTTTGGCCCTGGCACCAAAGTGGATATCAAG

SEQ ID NO: 2081 - protein, 243 aa, Artificial Sequence
  IGF1R11-HL
EVQLLESGGGLVQPGGSLRLSCAASGFTFSKYMMSWVRQAPGKGLEWVSYISPSGGLTWYADSVKGRFTISRDNSKNTLYLQMNSLREADTAVYYCARDGARGYGMDVWGQGTTVTVSSGGGGSGGGGSGGGGSDIQMTQSPATLSLSPGERATLSCRASQSVSSYLAWYQQKPGQAPRLLIYDASNRATGIPARFSGSGSGTDFTLTISSLEPEDFAVYYCQQRSNWPPEVTFGPGTKVDIK

SEQ ID NO: 2082 - DNA, 729 bp, Artificial Sequence
  IGF1R11-HL
gaggtccagctgttggaaagcggaggcggactcgtgcagcctggcggatctttgcgactttcctgtgctgcctccggtttcaccttctccaagtacatgatgagctgggtgagacaggcaccaggcaaaggactggaatgggtgagctacattagcccatctggcggactgacatggtatgccgatagtgttaaggggaggttcaccatcagtagggacaatagcaagaacaccctgtacctgcagatgaactcactgcgagaggctgatactgccgtgtattactgcgcaagggatggagctagaggctatggaatggacgtgtggggacagggaacaaccgtcaccgtgagcagtgggggaggcggaagcggagggggaggtagtggagggggaggctcagacattcagatgacacagagccctgccacactgagcctgtcacctggagagcgagctacattgagctgtcgcgctagccagagcgtgtcttcctatcttgcctggtaccagcagaaacctggacaggcaccaagactcctgatctacgacgcctccaaccgtgcaactggcatccctgctcgcttttctggctctggctctgggaccgactttaccttgaccatctcctcactggaacccgaggattttgccgtgtactattgccagcagcggagcaattggcctcccgaagtcacttttggccctggcaccaaagtggatatcaag

SEQ ID NO: 2083 - protein, 498 aa, Artificial Sequence
  IGF1R11HLxI2CHL
EVQLLESGGGLVQPGGSLRLSCAASGFTFSKYMMSWVRQAPGKGLEWVSYISPSGGLTWYADSVKGRFTISRDNSKNTLYLQMNSLREADTAVYYCARDGARGYGMDVWGQGTTVTVSSGGGGSGGGGSGGGGSDIQMTQSPATLSLSPGERATLSCRASQSVSSYLAWYQQKPGQAPRLLIYDASNRATGIPARFSGSGSGTDFTLTISSLEPEDFAVYYCQQRSNWPPEVTFGPGTKVDIKSGGGGSEVQLVESGGGLVQPGGSLKLSCAASGFTFNKYAMNWVRQAPGKGLEWVARIRSKYNNYATYYADSVKDRFTISRDDSKNTAYLQMNNLKTEDTAVYYCVRHGNFGNSYISYWAYWGQGTLVTVSSGGGGSGGGGSGGGGSQTVVTQEPSLTVSPGGTVTLTCGSSTGAVTSGNYPNWVQQKPGQAPRGLIGGTKFLAPGTPARFSGSLLGGKAALTLSGVQPEDEAEYYCVLWYSNRWVFGGGTKLTVL

SEQ ID NO: 2084 - DNA, 1494 bp, Artificial Sequence
  IGF1R11HLxI2CHL
gaggtccagctgttggaaagcggaggcggactcgtgcagcctggcggatctttgcgactttcctgtgctgcctccggtttcaccttctccaagtacatgatgagctgggtgagacaggcaccaggcaaaggactggaatgggtgagctacattagcccatctggcggactgacatggtatgccgatagtgttaaggggaggttcaccatcagtagggacaatagcaagaacaccctgtacctgcagatgaactcactgcgagaggctgatactgccgtgtattactgcgcaagggatggagctagaggctatggaatggacgtgtggggacagggaacaaccgtcaccgtgagcagtgggggaggcggaagcggagggggaggtagtggagggggaggctcagacattcagatgacacagagccctgccacactgagcctgtcacctggagagcgagctacattgagctgtcgcgctagccagagcgtgtcttcctatcttgcctggtaccagcagaaacctggacaggcaccaagactcctgatctacgacgcctccaaccgtgcaactggcatccctgctcgcttttctggctctggctctgggaccgactttaccttgaccatctcctcactggaacccgaggattttgccgtgtactattgccagcagcggagcaattggcctcccgaagtcacttttggccctggcaccaaagtggatatcaagtccggaggtggtggatccgaggtgcagctggtcgagtctggaggaggattggtgcagcctggagggtcattgaaactctcatgtgcagcctctggattcaccttcaataagtacgccatgaactgggtccgccaggctccaggaaagggtttggaatgggttgctcgcataagaagtaaatataataattatgcaacatattatgccgattcagtgaaagacaggttcaccatctccagagatgattcaaaaaacactgcctatctacaaatgaacaacttgaagactgaggacactgccgtgtactactgtgtgagacatgggaacttcggtaatagctacatatcctactgggcttactggggccaagggactctggtcaccgtctcctcaggtggtggtggttctggcggcggcggctccggtggtggtggttctcagactgttgtgactcaggaaccttcactcaccgtatcacctggtggaacagtcacactcacttgtggctcctcgactggggctgttacatctggcaactacccaaactgggtccaacaaaaaccaggtcaggcaccccgtggtctaataggtgggactaagttcctcgcccccggtactcctgccagattctcaggctccctgcttggaggcaaggctgccctcaccctctcaggggtacagccagaggatgaggcagaatattactgtgttctatggtacagcaaccgctgggtgttcggtggaggaaccaaactgactgtccta

SEQ ID NO: 2085 - protein, 124 aa, Artificial Sequence
  IGF1R12-H
EVQLLESGGGLVQPGGSLRLSCAASGFTFSNYPMYWVRQAPGKGLEWVSRISSSGGRTVYADSVKGRFTISRDNSKNTLYLQMNSLRAEDTAVYYCARDRWSRSAAEYGLGGYWGQGTLVTVSS

SEQ ID NO: 2086 - protein, 5 aa, Artificial Sequence
  IGF1R12-HCDR1
NYPMY

SEQ ID NO: 2087 - protein, 17 aa, Artificial Sequence
  IGF1R12-HCDR2
RISSSGGRTVYADSVKG

SEQ ID NO: 2088 - protein, 15 aa, Artificial Sequence
  IGF1R12-HCDR3
DRWSRSAAEYGLGGY

SEQ ID NO: 2089 - DNA, 372 bp, Artificial Sequence
  IGF1R12-H
gaagtccagctccttgaaagcggtggcggattggtccagcctggaggctctttgagactctcctgtgccgcatcaggcttcaccttttccaactatcctatgtactgggttcgccaggctcctggaaaaggcttggaatgggtgtcacggattagctctagcgggggaaggactgtctatgccgattccgtgaaagggagattcaccatctctcgggacaatagcaagaacaccctgtatctccagatgaactctcttcgtgccgaagacactgccgtgtattactgcgcacgagaccgatggagccgatcagcagctgaatacggcttgggaggctactggggtcagggaactcttgtgactgtctctagc

SEQ ID NO: 2090 - protein, 112 aa, Artificial Sequence
  IGF1R12-L
DIQMTQSPDSLAVSLGERATINCKSSQSVLYSSNNKNYLAWYQQKPGQPPKLLIYLASTRESGVPDRFSGSGSGTDFTLTISSLQAEDVAVYYCQQYYSTWTFGQGTKVEIK

SEQ ID NO: 2091 - protein, 17 aa, Artificial Sequence
  IGF1R12-LCDR1
KSSQSVLYSSNNKNYLA

SEQ ID NO: 2092 - protein, 7 aa, Artificial Sequence
  IGF1R12-LCDR2
LASTRES

SEQ ID NO: 2093 - protein, 8 aa, Artificial Sequence
  IGF1R12-LCDR3
QQYYSTWT

SEQ ID NO: 2094 - DNA, 336 bp, Artificial Sequence
  IGF1R12-L
gatatccagatgactcagagccctgattcactggcagtgtctctcggagaacgtgccacaatcaactgcaagagtagccagtccgtcctttactcctccaacaacaaaaactacctcgcatggtaccagcagaaacctgggcagccacccaaacttctcatctatcttgcttccacacgtgagagtggcgtgcctgaccgttttagcggatccggtagcggaacagatttcactctcacaatctcaagcctgcaggctgaagatgtcgcagtctactattgccagcagtattactcaacctggacattcggacaggggacaaaagtggagatcaaa

SEQ ID NO: 2095 - protein, 251 aa, Artificial Sequence
  IGF1R12-HL
EVQLLESGGGLVQPGGSLRLSCAASGFTFSNYPMYWVRQAPGKGLEWVSRISSSGGRTVYADSVKGRFTISRDNSKNTLYLQMNSLRAEDTAVYYCARDRWSRSAAEYGLGGYWGQGTLVTVSSGGGGSGGGGSGGGGSDIQMTQSPDSLAVSLGERATINCKSSQSVLYSSNNKNYLAWYQQKPGQPPKLLIYLASTRESGVPDRFSGSGSGTDFTLTISSLQAEDVAVYYCQQYYSTWTFGQGTKVEIK

SEQ ID NO: 2096 - DNA, 753 bp, Artificial Sequence
  IGF1R12-HL
gaagtccagctccttgaaagcggtggcggattggtccagcctggaggctctttgagactctcctgtgccgcatcaggcttcaccttttccaactatcctatgtactgggttcgccaggctcctggaaaaggcttggaatgggtgtcacggattagctctagcgggggaaggactgtctatgccgattccgtgaaagggagattcaccatctctcgggacaatagcaagaacaccctgtatctccagatgaactctcttcgtgccgaagacactgccgtgtattactgcgcacgagaccgatggagccgatcagcagctgaatacggcttgggaggctactggggtcagggaactcttgtgactgtctctagcggaggcggtggaagcgggggaggcggatctggtggaggcggaagcgatatccagatgactcagagccctgattcactggcagtgtctctcggagaacgtgccacaatcaactgcaagagtagccagtccgtcctttactcctccaacaacaaaaactacctcgcatggtaccagcagaaacctgggcagccacccaaacttctcatctatcttgcttccacacgtgagagtggcgtgcctgaccgttttagcggatccggtagcggaacagatttcactctcacaatctcaagcctgcaggctgaagatgtcgcagtctactattgccagcagtattactcaacctggacattcggacaggggacaaaagtggagatcaaa

SEQ ID NO: 2097 - protein, 506 aa, Artificial Sequence
  IGF1R12HLxI2CHL
EVQLLESGGGLVQPGGSLRLSCAASGFTFSNYPMYWVRQAPGKGLEWVSRISSSGGRTVYADSVKGRFTISRDNSKNTLYLQMNSLRAEDTAVYYCARDRWSRSAAEYGLGGYWGQGTLVTVSSGGGGSGGGGSGGGGSDIQMTQSPDSLAVSLGERATINCKSSQSVLYSSNNKNYLAWYQQKPGQPPKLLIYLASTRESGVPDRFSGSGSGTDFTLTISSLQAEDVAVYYCQQYYSTWTFGQGTKVEIKSGGGGSEVQLVESGGGLVQPGGSLKLSCAASGFTFNKYAMNWVRQAPGKGLEWVARIRSKYNNYATYYADSVKDRFTISRDDSKNTAYLQMNNLKTEDTAVYYCVRHGNFGNSYISYWAYWGQGTLVTVSSGGGGSGGGGSGGGGSQTVVTQEPSLTVSPGGTVTLTCGSSTGAVTSGNYPNWVQQKPGQAPRGLIGGTKFLAPGTPARFSGSLLGGKAALTLSGVQPEDEAEYYCVLWYSNRWVFGGGTKLTVL

SEQ ID NO: 2098 - DNA, 1518 bp, Artificial Sequence
  IGF1R12HLxI2CHL
gaagtccagctccttgaaagcggtggcggattggtccagcctggaggctctttgagactctcctgtgccgcatcaggcttcaccttttccaactatcctatgtactgggttcgccaggctcctggaaaaggcttggaatgggtgtcacggattagctctagcgggggaaggactgtctatgccgattccgtgaaagggagattcaccatctctcgggacaatagcaagaacaccctgtatctccagatgaactctcttcgtgccgaagacactgccgtgtattactgcgcacgagaccgatggagccgatcagcagctgaatacggcttgggaggctactggggtcagggaactcttgtgactgtctctagcggaggcggtggaagcgggggaggcggatctggtggaggcggaagcgatatccagatgactcagagccctgattcactggcagtgtctctcggagaacgtgccacaatcaactgcaagagtagccagtccgtcctttactcctccaacaacaaaaactacctcgcatggtaccagcagaaacctgggcagccacccaaacttctcatctatcttgcttccacacgtgagagtggcgtgcctgaccgttttagcggatccggtagcggaacagatttcactctcacaatctcaagcctgcaggctgaagatgtcgcagtctactattgccagcagtattactcaacctggacattcggacaggggacaaaagtggagatcaaatccggaggtggtggatccgaggtgcagctggtcgagtctggaggaggattggtgcagcctggagggtcattgaaactctcatgtgcagcctctggattcaccttcaataagtacgccatgaactgggtccgccaggctccaggaaagggtttggaatgggttgctcgcataagaagtaaatataataattatgcaacatattatgccgattcagtgaaagacaggttcaccatctccagagatgattcaaaaaacactgcctatctacaaatgaacaacttgaagactgaggacactgccgtgtactactgtgtgagacatgggaacttcggtaatagctacatatcctactgggcttactggggccaagggactctggtcaccgtctcctcaggtggtggtggttctggcggcggcggctccggtggtggtggttctcagactgttgtgactcaggaaccttcactcaccgtatcacctggtggaacagtcacactcacttgtggctcctcgactggggctgttacatctggcaactacccaaactgggtccaacaaaaaccaggtcaggcaccccgtggtctaataggtgggactaagttcctcgcccccggtactcctgccagattctcaggctccctgcttggaggcaaggctgccctcaccctctcaggggtacagccagaggatgaggcagaatattactgtgttctatggtacagcaaccgctgggtgttcggtggaggaaccaaactgactgtccta

SEQ ID NO: 2099 - protein, 128 aa, Artificial Sequence
  IGF1R13-H
EVQLVQSGAEVKKPGESLTISCKGPGYNFFNYWIGWVRQMPGKGLEWMGIIYPTDSDTRYSPSFQGQVTISVDKSISTAYLQWSSLKASDTAMYYCARSIRYCPGGRCYSGYYGMDVWGQGTMVTVSS

SEQ ID NO: 2100 - protein, 5 aa, Artificial Sequence
  IGF1R13-HCDR1
NYWIG

SEQ ID NO: 2101 - protein, 17 aa, Artificial Sequence
  IGF1R13-HCDR2
IIYPTDSDTRYSPSFQG

SEQ ID NO: 2102 - protein, 19 aa, Artificial Sequence
  IGF1R13-HCDR3
SIRYCPGGRCYSGYYGMDV

SEQ ID NO: 2103 - DNA, 384 bp, Artificial Sequence
  IGF1R13-H
gaagtccagttggtgcagagtggtgccgaagtcaaaaagcctggcgagagcctgaccatctcatgtaagggtcctggctacaacttcttcaactactggatcggatgggtgcgacagatgcctggaaaagggctcgaatggatgggcattatctatcccaccgactccgacacacggtattccccatcatttcagggacaggtcaccatctccgttgacaagagcatctccaccgcttatctccagtggagttccctgaaagcctccgacaccgcaatgtattactgcgcacgtagtatccgttactgcccaggaggcagatgctatagcggatattacggcatggacgtttggggacagggaacaatggtgactgtgagctca

SEQ ID NO: 2104 - protein, 108 aa, Artificial Sequence
  IGF1R13-L
SSELTQDPAVSVALGQTVRITCQGDSLRSYYASWYQQKPGQAPVLVIYGKNNRPSGIPDRFSGSSSGNTASLTITGAQAEDEADYYCNSRDSSGNHVVFGGGTKLTVL

SEQ ID NO: 2105 - protein, 11 aa, Artificial Sequence
  IGF1R13-LCDR1
QGDSLRSYYAS

SEQ ID NO: 2106 - protein, 7 aa, Artificial Sequence
  IGF1R13-LCDR2
GKNNRPS

SEQ ID NO: 2107 - protein, 11 aa, Artificial Sequence
  IGF1R13-LCDR3
NSRDSSGNHVV

SEQ ID NO: 2108 - DNA, 324 bp, Artificial Sequence
  IGF1R13-L
tcaagcgaactgactcaggatccagctgtttctgtcgccttgggacagactgtgcgcattacatgtcagggtgatagcttgcgtagctactacgcttcatggtaccagcagaagcctggacaggcacctgtcctggtgatctacggcaagaacaataggccaagcggtattcccgatcggttttctggatcctcatccggcaatactgcctctctgacaatcaccggtgctcaggctgaagatgaggctgactactactgcaactcccgagattctagcggaaatcacgtggtcttcggaggtgggacaaaacttaccgtgctc

SEQ ID NO: 2109 - protein, 251 aa, Artificial Sequence
  IGF1R13-HL
EVQLVQSGAEVKKPGESLTISCKGPGYNFFNYWIGWVRQMPGKGLEWMGIIYPTDSDTRYSPSFQGQVTISVDKSISTAYLQWSSLKASDTAMYYCARSIRYCPGGRCYSGYYGMDVWGQGTMVTVSSGGGGSGGGGSGGGGSSSELTQDPAVSVALGQTVRITCQGDSLRSYYASWYQQKPGQAPVLVIYGKNNRPSGIPDRFSGSSSGNTASLTITGAQAEDEADYYCNSRDSSGNHVVFGGGTKLTVL

SEQ ID NO: 2110 - DNA, 753 bp, Artificial Sequence
  IGF1R13-HL
gaagtccagttggtgcagagtggtgccgaagtcaaaaagcctggcgagagcctgaccatctcatgtaagggtcctggctacaacttcttcaactactggatcggatgggtgcgacagatgcctggaaaagggctcgaatggatgggcattatctatcccaccgactccgacacacggtattccccatcatttcagggacaggtcaccatctccgttgacaagagcatctccaccgcttatctccagtggagttccctgaaagcctccgacaccgcaatgtattactgcgcacgtagtatccgttactgcccaggaggcagatgctatagcggatattacggcatggacgtttggggacagggaacaatggtgactgtgagctcaggagggggaggctctggtgggggaggttctggaggtggaggctcttcaagcgaactgactcaggatccagctgtttctgtcgccttgggacagactgtgcgcattacatgtcagggtgatagcttgcgtagctactacgcttcatggtaccagcagaagcctggacaggcacctgtcctggtgatctacggcaagaacaataggccaagcggtattcccgatcggttttctggatcctcatccggcaatactgcctctctgacaatcaccggtgctcaggctgaagatgaggctgactactactgcaactcccgagattctagcggaaatcacgtggtcttcggaggtgggacaaaacttaccgtgctc

SEQ ID NO: 2111 - protein, 506 aa, Artificial Sequence
  IGF1R13HLxI2CHL
EVQLVQSGAEVKKPGESLTISCKGPGYNFFNYWIGWVRQMPGKGLEWMGIIYPTDSDTRYSPSFQGQVTISVDKSISTAYLQWSSLKASDTAMYYCARSIRYCPGGRCYSGYYGMDVWGQGTMVTVSSGGGGSGGGGSGGGGSSSELTQDPAVSVALGQTVRITCQGDSLRSYYASWYQQKPGQAPVLVIYGKNNRPSGIPDRFSGSSSGNTASLTITGAQAEDEADYYCNSRDSSGNHVVFGGGTKLTVLSGGGGSEVQLVESGGGLVQPGGSLKLSCAASGFTFNKYAMNWVRQAPGKGLEWVARIRSKYNNYATYYADSVKDRFTISRDDSKNTAYLQMNNLKTEDTAVYYCVRHGNFGNSYISYWAYWGQGTLVTVSSGGGGSGGGGSGGGGSQTVVTQEPSLTVSPGGTVTLTCGSSTGAVTSGNYPNWVQQKPGQAPRGLIGGTKFLAPGTPARFSGSLLGGKAALTLSGVQPEDEAEYYCVLWYSNRWVFGGGTKLTVL

SEQ ID NO: 2112 - DNA, 1518 bp, Artificial Sequence
  IGF1R13HLxI2CHL
gaagtccagttggtgcagagtggtgccgaagtcaaaaagcctggcgagagcctgaccatctcatgtaagggtcctggctacaacttcttcaactactggatcggatgggtgcgacagatgcctggaaaagggctcgaatggatgggcattatctatcccaccgactccgacacacggtattccccatcatttcagggacaggtcaccatctccgttgacaagagcatctccaccgcttatctccagtggagttccctgaaagcctccgacaccgcaatgtattactgcgcacgtagtatccgttactgcccaggaggcagatgctatagcggatattacggcatggacgtttggggacagggaacaatggtgactgtgagctcaggagggggaggctctggtgggggaggttctggaggtggaggctcttcaagcgaactgactcaggatccagctgtttctgtcgccttgggacagactgtgcgcattacatgtcagggtgatagcttgcgtagctactacgcttcatggtaccagcagaagcctggacaggcacctgtcctggtgatctacggcaagaacaataggccaagcggtattcccgatcggttttctggatcctcatccggcaatactgcctctctgacaatcaccggtgctcaggctgaagatgaggctgactactactgcaactcccgagattctagcggaaatcacgtggtcttcggaggtgggacaaaacttaccgtgctctccggaggtggtggatccgaggtgcagctggtcgagtctggaggaggattggtgcagcctggagggtcattgaaactctcatgtgcagcctctggattcaccttcaataagtacgccatgaactgggtccgccaggctccaggaaagggtttggaatgggttgctcgcataagaagtaaatataataattatgcaacatattatgccgattcagtgaaagacaggttcaccatctccagagatgattcaaaaaacactgcctatctacaaatgaacaacttgaagactgaggacactgccgtgtactactgtgtgagacatgggaacttcggtaatagctacatatcctactgggcttactggggccaagggactctggtcaccgtctcctcaggtggtggtggttctggcggcggcggctccggtggtggtggttctcagactgttgtgactcaggaaccttcactcaccgtatcacctggtggaacagtcacactcacttgtggctcctcgactggggctgttacatctggcaactacccaaactgggtccaacaaaaaccaggtcaggcaccccgtggtctaataggtgggactaagttcctcgcccccggtactcctgccagattctcaggctccctgcttggaggcaaggctgccctcaccctctcaggggtacagccagaggatgaggcagaatattactgtgttctatggtacagcaaccgctgggtgttcggtggaggaaccaaactgactgtccta

SEQ ID NO: 2113 - protein, 121 aa, Artificial Sequence
  IGF1R15-H
EVQLLESGGGLVQPGGSLRLSCAASGFTFSSYAMSWVRQAPGKGLEWVSAISGSGGSTYYADSVKGRFTISRDNSKNTLYLQMNSLRAEDTAVYYCASSPYSSRWYSFDPWGQGTMVTVSS

SEQ ID NO: 2114 - protein, 5 aa, Artificial Sequence
  IGF1R15-HCDR1
SYAMS

SEQ ID NO: 2115 - protein, 17 aa, Artificial Sequence
  IGF1R15-HCDR2
AISGSGGSTYYADSVKG

SEQ ID NO: 2116 - protein, 12 aa, Artificial Sequence
  IGF1R15-HCDR3
SPYSSRWYSFDP

SEQ ID NO: 2117 - DNA, 363 bp, Artificial Sequence
  IGF1R15-H
gaggttcagctgctcgaaagcggaggcggtttggtgcagcctgggggaagcctgagacttagctgtgctgcaagcggattcaccttctccagctatgccatgagctgggtgaggcaggcccctggcaaaggactggagtgggtgagcgctatctcaggaagcggcggttctacctactacgccgatagcgtcaaggggaggttcaccatcagccgtgacaacagcaagaacaccctgtacctccagatgaatagcctgcgtgctgaggacactgccgtttactactgcgcaagctccccatactcctcacggtggtatagcttcgatccatggggacaggggactatggtgaccgtgagtagt

SEQ ID NO: 2118 - protein, 106 aa, Artificial Sequence
  IGF1R15-L
SYELTQPPSVSVSPGQTATITCSGDDLGNKYVSWYQQKPGQSPVLVIYQDTKRPSGIPERFSGSNSGNIATLTISGTQAVDEADYYCQVWDTGTVVFGGGTKLTVL

SEQ ID NO: 2119 - protein, 11 aa, Artificial Sequence
  IGF1R15-LCDR1
SGDDLGNKYVS

SEQ ID NO: 2120 - protein, 7 aa, Artificial Sequence
  IGF1R15-LCDR2
QDTKRPS

SEQ ID NO: 2121 - protein, 9 aa, Artificial Sequence
  IGF1R15-LCDR3
QVWDTGTVV

SEQ ID NO: 2122 - DNA, 318 bp, Artificial Sequence
  IGF1R15-L
agctatgaactgacacagccacctagcgtgagcgttagccctggacagactgccacaatcacctgtagtggggatgaccttggcaacaagtacgtgagctggtatcagcagaagcctggccagtctcccgtgctggtgatctaccaggacaccaaacgacctagcggaatcccagagcgattcagcggaagcaacagcgggaacatcgcaactctcaccatttccggcactcaggccgtggatgaagccgactactattgccaggtgtgggacactggaaccgtcgtgtttgggggaggcacaaaactgaccgtcctg

SEQ ID NO: 2123 - protein, 242 aa, Artificial Sequence
  IGF1R15-HL
EVQLLESGGGLVQPGGSLRLSCAASGFTFSSYAMSWVRQAPGKGLEWVSAISGSGGSTYYADSVKGRFTISRDNSKNTLYLQMNSLRAEDTAVYYCASSPYSSRWYSFDPWGQGTMVTVSSGGGGSGGGGSGGGGSSYELTQPPSVSVSPGQTATITCSGDDLGNKYVSWYQQKPGQSPVLVIYQDTKRPSGIPERFSGSNSGNIATLTISGTQAVDEADYYCQVWDTGTVVFGGGTKLTVL

SEQ ID NO: 2124 - DNA, 726 bp, Artificial Sequence
  IGF1R15-HL
gaggttcagctgctcgaaagcggaggcggtttggtgcagcctgggggaagcctgagacttagctgtgctgcaagcggattcaccttctccagctatgccatgagctgggtgaggcaggcccctggcaaaggactggagtgggtgagcgctatctcaggaagcggcggttctacctactacgccgatagcgtcaaggggaggttcaccatcagccgtgacaacagcaagaacaccctgtacctccagatgaatagcctgcgtgctgaggacactgccgtttactactgcgcaagctccccatactcctcacggtggtatagcttcgatccatggggacaggggactatggtgaccgtgagtagtggcggagggggaagcggaggaggcgggagcggcggaggcggaagcagctatgaactgacacagccacctagcgtgagcgttagccctggacagactgccacaatcacctgtagtggggatgaccttggcaacaagtacgtgagctggtatcagcagaagcctggccagtctcccgtgctggtgatctaccaggacaccaaacgacctagcggaatcccagagcgattcagcggaagcaacagcgggaacatcgcaactctcaccatttccggcactcaggccgtggatgaagccgactactattgccaggtgtgggacactggaaccgtcgtgtttgggggaggcacaaaactgaccgtcctg

SEQ ID NO: 2125 - protein, 497 aa, Artificial Sequence
  IGF1R15HLxI2CHL
EVQLLESGGGLVQPGGSLRLSCAASGFTFSSYAMSWVRQAPGKGLEWVSAISGSGGSTYYADSVKGRFTISRDNSKNTLYLQMNSLRAEDTAVYYCASSPYSSRWYSFDPWGQGTMVTVSSGGGGSGGGGSGGGGSSYELTQPPSVSVSPGQTATITCSGDDLGNKYVSWYQQKPGQSPVLVIYQDTKRPSGIPERFSGSNSGNIATLTISGTQAVDEADYYCQVWDTGTVVFGGGTKLTVLSGGGGSEVQLVESGGGLVQPGGSLKLSCAASGFTFNKYAMNWVRQAPGKGLEWVARIRSKYNNYATYYADSVKDRFTISRDDSKNTAYLQMNNLKTEDTAVYYCVRHGNFGNSYISYWAYWGQGTLVTVSSGGGGSGGGGSGGGGSQTVVTQEPSLTVSPGGTVTLTCGSSTGAVTSGNYPNWVQQKPGQAPRGLIGGTKFLAPGTPARFSGSLLGGKAALTLSGVQPEDEAEYYCVLWYSNRWVFGGGTKLTVL

SEQ ID NO: 2126 - DNA, 1491 bp, Artificial Sequence
  IGF1R15HLxI2CHL
gaggttcagctgctcgaaagcggaggcggtttggtgcagcctgggggaagcctgagacttagctgtgctgcaagcggattcaccttctccagctatgccatgagctgggtgaggcaggcccctggcaaaggactggagtgggtgagcgctatctcaggaagcggcggttctacctactacgccgatagcgtcaaggggaggttcaccatcagccgtgacaacagcaagaacaccctgtacctccagatgaatagcctgcgtgctgaggacactgccgtttactactgcgcaagctccccatactcctcacggtggtatagcttcgatccatggggacaggggactatggtgaccgtgagtagtggcggagggggaagcggaggaggcgggagcggcggaggcggaagcagctatgaactgacacagccacctagcgtgagcgttagccctggacagactgccacaatcacctgtagtggggatgaccttggcaacaagtacgtgagctggtatcagcagaagcctggccagtctcccgtgctggtgatctaccaggacaccaaacgacctagcggaatcccagagcgattcagcggaagcaacagcgggaacatcgcaactctcaccatttccggcactcaggccgtggatgaagccgactactattgccaggtgtgggacactggaaccgtcgtgtttgggggaggcacaaaactgaccgtcctgtccggaggtggtggatccgaggtgcagctggtcgagtctggaggaggattggtgcagcctggagggtcattgaaactctcatgtgcagcctctggattcaccttcaataagtacgccatgaactgggtccgccaggctccaggaaagggtttggaatgggttgctcgcataagaagtaaatataataattatgcaacatattatgccgattcagtgaaagacaggttcaccatctccagagatgattcaaaaaacactgcctatctacaaatgaacaacttgaagactgaggacactgccgtgtactactgtgtgagacatgggaacttcggtaatagctacatatcctactgggcttactggggccaagggactctggtcaccgtctcctcaggtggtggtggttctggcggcggcggctccggtggtggtggttctcagactgttgtgactcaggaaccttcactcaccgtatcacctggtggaacagtcacactcacttgtggctcctcgactggggctgttacatctggcaactacccaaactgggtccaacaaaaaccaggtcaggcaccccgtggtctaataggtgggactaagttcctcgcccccggtactcctgccagattctcaggctccctgcttggaggcaaggctgccctcaccctctcaggggtacagccagaggatgaggcagaatattactgtgttctatggtacagcaaccgctgggtgttcggtggaggaaccaaactgactgtccta

SEQ ID NO: 2127 - protein, 124 aa, Artificial Sequence
  IGF1R16-H
QVQLQQSGAELVKPGASVKLSCKASGYTFTSYWMHWVKQRPGQGLEWIGEINPSNGRTNYNEKFKRKATLTVDKSSSTAYMQLSSLTSEDSAVYYFARGRPDYYGSSKWYFDVWGAGTTVTVSS

SEQ ID NO: 2128 - protein, 5 aa, Artificial Sequence
  IGF1R16-HCDR1
SYWMH

SEQ ID NO: 2129 - protein, 17 aa, Artificial Sequence
  IGF1R16-HCDR2
EINPSNGRTNYNEKFKR

SEQ ID NO: 2130 - protein, 15 aa, Artificial Sequence
  IGF1R16-HCDR3
GRPDYYGSSKWYFDV

SEQ ID NO: 2131 - DNA, 372 bp, Artificial Sequence
  IGF1R16-H
caggttcagctgcagcagagcggagctgagctcgttaaacctggtgcttccgtgaaactgagctgcaaagcctccggctataccttcacaagctactggatgcactgggtcaaacagcgtcctggtcagggtctcgaatggattggggagatcaacccctccaacggccgcaccaattacaatgagaagttcaagcggaaggccacccttaccgtggataagagctcatctaccgcctacatgcagctgtcttcactgacatctgaggactctgccgtgtattactttgcaagagggaggcctgactactacgggtcatccaagtggtactttgacgtctggggagctgggactaccgtgactgtgtctagc

SEQ ID NO: 2132 - protein, 112 aa, Artificial Sequence
  IGF1R16-L
DVLMTQTPLSLPVSLGDQASISCRSSQSIVHSNVNTYLEWYLQKPGQSPKLLIYKVSNRFSGVPDRFSGSGSGTDFTLRISRVEAEDLGIYYCFQGSHVPPTFGGGTKLEIK

SEQ ID NO: 2133 - protein, 16 aa, Artificial Sequence
  IGF1R16-LCDR1
RSSQSIVHSNVNTYLE

SEQ ID NO: 2134 - protein, 7 aa, Artificial Sequence
  IGF1R16-LCDR2
KVSNRFS

SEQ ID NO: 2135 - protein, 9 aa, Artificial Sequence
  IGF1R16-LCDR3
FQGSHVPPT

SEQ ID NO: 2136 - DNA, 336 bp, Artificial Sequence
  IGF1R16-L
gatgtcttgatgactcagactccactgtcacttcctgtgtcactgggagatcaggcatccattagctgcaggagtagccagagcatcgtgcactccaacgtcaacacatacctggagtggtacctgcagaaacctggccagagcccaaagctgctcatctacaaggtgagcaatcggttttccggcgttcccgatagattcagcggaagcggaagcggtacagactttaccctgcgcatttctcgagtggaagccgaagacctgggcatctactattgcttccagggttctcatgttcccccaaccttcggtggcggaacaaaactcgaaatcaag

SEQ ID NO: 2137 - protein, 251 aa, Artificial Sequence
  IGF1R16-HL
QVQLQQSGAELVKPGASVKLSCKASGYTFTSYWMHWVKQRPGQGLEWIGEINPSNGRTNYNEKFKRKATLTVDKSSSTAYMQLSSLTSEDSAVYYFARGRPDYYGSSKWYFDVWGAGTTVTVSSGGGGSGGGGSGGGGSDVLMTQTPLSLPVSLGDQASISCRSSQSIVHSNVNTYLEWYLQKPGQSPKLLIYKVSNRFSGVPDRFSGSGSGTDFTLRISRVEAEDLGIYYCFQGSHVPPTFGGGTKLEIK

SEQ ID NO: 2138 - DNA, 753 bp, Artificial Sequence
  IGF1R16-HL
caggttcagctgcagcagagcggagctgagctcgttaaacctggtgcttccgtgaaactgagctgcaaagcctccggctataccttcacaagctactggatgcactgggtcaaacagcgtcctggtcagggtctcgaatggattggggagatcaacccctccaacggccgcaccaattacaatgagaagttcaagcggaaggccacccttaccgtggataagagctcatctaccgcctacatgcagctgtcttcactgacatctgaggactctgccgtgtattactttgcaagagggaggcctgactactacgggtcatccaagtggtactttgacgtctggggagctgggactaccgtgactgtgtctagcggaggcggagggagcggagggggaggctccggtggcgggggatctgatgtcttgatgactcagactccactgtcacttcctgtgtcactgggagatcaggcatccattagctgcaggagtagccagagcatcgtgcactccaacgtcaacacatacctggagtggtacctgcagaaacctggccagagcccaaagctgctcatctacaaggtgagcaatcggttttccggcgttcccgatagattcagcggaagcggaagcggtacagactttaccctgcgcatttctcgagtggaagccgaagacctgggcatctactattgcttccagggttctcatgttcccccaaccttcggtggcggaacaaaactcgaaatcaag

SEQ ID NO: 2139 - protein, 506 aa, Artificial Sequence
  IGF1R16HLxI2CHL
QVQLQQSGAELVKPGASVKLSCKASGYTFTSYWMHWVKQRPGQGLEWIGEINPSNGRTNYNEKFKRKATLTVDKSSSTAYMQLSSLTSEDSAVYYFARGRPDYYGSSKWYFDVWGAGTTVTVSSGGGGSGGGGSGGGGSDVLMTQTPLSLPVSLGDQASISCRSSQSIVHSNVNTYLEWYLQKPGQSPKLLIYKVSNRFSGVPDRFSGSGSGTDFTLRISRVEAEDLGIYYCFQGSHVPPTFGGGTKLEIKSGGGGSEVQLVESGGGLVQPGGSLKLSCAASGFTFNKYAMNWVRQAPGKGLEWVARIRSKYNNYATYYADSVKDRFTISRDDSKNTAYLQMNNLKTEDTAVYYCVRHGNFGNSYISYWAYWGQGTLVTVSSGGGGSGGGGSGGGGSQTVVTQEPSLTVSPGGTVTLTCGSSTGAVTSGNYPNWVQQKPGQAPRGLIGGTKFLAPGTPARFSGSLLGGKAALTLSGVQPEDEAEYYCVLWYSNRWVFGGGTKLTVL

SEQ ID NO: 2140 - DNA, 1518 bp, Artificial Sequence
  IGF1R16HLxI2CHL
caggttcagctgcagcagagcggagctgagctcgttaaacctggtgcttccgtgaaactgagctgcaaagcctccggctataccttcacaagctactggatgcactgggtcaaacagcgtcctggtcagggtctcgaatggattggggagatcaacccctccaacggccgcaccaattacaatgagaagttcaagcggaaggccacccttaccgtggataagagctcatctaccgcctacatgcagctgtcttcactgacatctgaggactctgccgtgtattactttgcaagagggaggcctgactactacgggtcatccaagtggtactttgacgtctggggagctgggactaccgtgactgtgtctagcggaggcggagggagcggagggggaggctccggtggcgggggatctgatgtcttgatgactcagactccactgtcacttcctgtgtcactgggagatcaggcatccattagctgcaggagtagccagagcatcgtgcactccaacgtcaacacatacctggagtggtacctgcagaaacctggccagagcccaaagctgctcatctacaaggtgagcaatcggttttccggcgttcccgatagattcagcggaagcggaagcggtacagactttaccctgcgcatttctcgagtggaagccgaagacctgggcatctactattgcttccagggttctcatgttcccccaaccttcggtggcggaacaaaactcgaaatcaagtccggaggtggtggatccgaggtgcagctggtcgagtctggaggaggattggtgcagcctggagggtcattgaaactctcatgtgcagcctctggattcaccttcaataagtacgccatgaactgggtccgccaggctccaggaaagggtttggaatgggttgctcgcataagaagtaaatataataattatgcaacatattatgccgattcagtgaaagacaggttcaccatctccagagatgattcaaaaaacactgcctatctacaaatgaacaacttgaagactgaggacactgccgtgtactactgtgtgagacatgggaacttcggtaatagctacatatcctactgggcttactggggccaagggactctggtcaccgtctcctcaggtggtggtggttctggcggcggcggctccggtggtggtggttctcagactgttgtgactcaggaaccttcactcaccgtatcacctggtggaacagtcacactcacttgtggctcctcgactggggctgttacatctggcaactacccaaactgggtccaacaaaaaccaggtcaggcaccccgtggtctaataggtgggactaagttcctcgcccccggtactcctgccagattctcaggctccctgcttggaggcaaggctgccctcaccctctcaggggtacagccagaggatgaggcagaatattactgtgttctatggtacagcaaccgctgggtgttcggtggaggaaccaaactgactgtccta

SEQ ID NO: 2141 - protein, 125 aa, Artificial Sequence
  IGF1R17-H
QAQLVESGGGLVKPGGSLRLSCAASGFTFSDYYMSWIRQAPGKGLEWVSYISSSGSTRDYADSVKGRFTISRDNAKNSLYLQMNSLRAEDTAVYYCVRDGVETTFYYYYYGMDVWGQGTTVTVSS

SEQ ID NO: 2142 - protein, 5 aa, Artificial Sequence
  IGF1R17-HCDR1
DYYMS

SEQ ID NO: 2143 - protein, 17 aa, Artificial Sequence
  IGF1R17-HCDR2
YISSSGSTRDYADSVKG

SEQ ID NO: 2144 - protein, 16 aa, Artificial Sequence
  IGF1R17-HCDR3
DGVETTFYYYYYGMDV

SEQ ID NO: 2145 - DNA, 375 bp, Artificial Sequence
  IGF1R17-H
caggcacagctggtggaaagtggcggtggcttagttaagcctggtggatccctgcgactttcttgtgctgcctccggctttacgttttccgactactacatgtcctggattagacaagcccctggcaagggcttggaatgggtgagctacataagctcctcgggaagcactagggactatgccgatagcgttaaggggagattcacgataagcagggataacgccaagaactccctgtatctgcagatgaatagtctccgtgctgaggacactgccgtgtactattgcgtgagggatggcgtcgaaacaaccttctactactactactatggcatggacgtttggggacagggaacaactgtaaccgtgagctca

SEQ ID NO: 2146 - protein, 107 aa, Artificial Sequence
  IGF1R17-L
DIQMTQSPSSLSASVGDRVTFTCRASQDIRRDLGWYQQKPGKAPKRLIYAASRLQSGVPSRFSGSGSGTEFTLTISSLQPEDFATYYCLQHNNYPRTFGQGTEVEII

SEQ ID NO: 2147 - protein, 11 aa, Artificial Sequence
  IGF1R17-LCDR1
RASQDIRRDLG

SEQ ID NO: 2148 - protein, 7 aa, Artificial Sequence
  IGF1R17-LCDR2
AASRLQS

SEQ ID NO: 2149 - protein, 9 aa, Artificial Sequence
  IGF1R17-LCDR3
LQHNNYPRT

SEQ ID NO: 2150 - DNA, 321 bp, Artificial Sequence
  IGF1R17-L
gatatccagatgacacaaagcccaagctcgctgagcgctagcgtaggcgatcgagtgacattcacctgtagggctagccaggatattagacgggacctagggtggtaccagcagaaacctggcaaagctcccaaacgccttatctatgcggcttcacggctgcaatcgggagtcccctctcgcttttctggaagtgggagcggaaccgagtttacattgacgattagctccctccaacctgaggactttgcaacctattactgcctccagcacaataactatccacggaccttcggacaagggaccgaggtcgagatcatc

SEQ ID NO: 2151 - protein, 247 aa, Artificial Sequence
  IGF1R17-HL
QAQLVESGGGLVKPGGSLRLSCAASGFTFSDYYMSWIRQAPGKGLEWVSYISSSGSTRDYADSVKGRFTISRDNAKNSLYLQMNSLRAEDTAVYYCVRDGVETTFYYYYYGMDVWGQGTTVTVSSGGGGSGGGGSGGGGSDIQMTQSPSSLSASVGDRVTFTCRASQDIRRDLGWYQQKPGKAPKRLIYAASRLQSGVPSRFSGSGSGTEFTLTISSLQPEDFATYYCLQHNNYPRTFGQGTEVEII

SEQ ID NO: 2152 - DNA, 741 bp, Artificial Sequence
  IGF1R17-HL
caggcacagctggtggaaagtggcggtggcttagttaagcctggtggatccctgcgactttcttgtgctgcctccggctttacgttttccgactactacatgtcctggattagacaagcccctggcaagggcttggaatgggtgagctacataagctcctcgggaagcactagggactatgccgatagcgttaaggggagattcacgataagcagggataacgccaagaactccctgtatctgcagatgaatagtctccgtgctgaggacactgccgtgtactattgcgtgagggatggcgtcgaaacaaccttctactactactactatggcatggacgtttggggacagggaacaactgtaaccgtgagctcaggaggtggaggtagcggaggtggaggtagtggtggaggtggctcggatatccagatgacacaaagcccaagctcgctgagcgctagcgtaggcgatcgagtgacattcacctgtagggctagccaggatattagacgggacctagggtggtaccagcagaaacctggcaaagctcccaaacgccttatctatgcggcttcacggctgcaatcgggagtcccctctcgcttttctggaagtgggagcggaaccgagtttacattgacgattagctccctccaacctgaggactttgcaacctattactgcctccagcacaataactatccacggaccttcggacaagggaccgaggtcgagatcatc

SEQ ID NO: 2153 - protein, 502 aa, Artificial Sequence
  IGF1R17HLxI2CHL
QAQLVESGGGLVKPGGSLRLSCAASGFTFSDYYMSWIRQAPGKGLEWVSYISSSGSTRDYADSVKGRFTISRDNAKNSLYLQMNSLRAEDTAVYYCVRDGVETTFYYYYYGMDVWGQGTTVTVSSGGGGSGGGGSGGGGSDIQMTQSPSSLSASVGDRVTFTCRASQDIRRDLGWYQQKPGKAPKRLIYAASRLQSGVPSRFSGSGSGTEFTLTISSLQPEDFATYYCLQHNNYPRTFGQGTEVEIISGGGGSEVQLVESGGGLVQPGGSLKLSCAASGFTFNKYAMNWVRQAPGKGLEWVARIRSKYNNYATYYADSVKDRFTISRDDSKNTAYLQMNNLKTEDTAVYYCVRHGNFGNSYISYWAYWGQGTLVTVSSGGGGSGGGGSGGGGSQTVVTQEPSLTVSPGGTVTLTCGSSTGAVTSGNYPNWVQQKPGQAPRGLIGGTKFLAPGTPARFSGSLLGGKAALTLSGVQPEDEAEYYCVLWYSNRWVFGGGTKLTVL

SEQ ID NO: 2154 - DNA, 1506 bp, Artificial Sequence
  IGF1R17HLxI2CHL
caggcacagctggtggaaagtggcggtggcttagttaagcctggtggatccctgcgactttcttgtgctgcctccggctttacgttttccgactactacatgtcctggattagacaagcccctggcaagggcttggaatgggtgagctacataagctcctcgggaagcactagggactatgccgatagcgttaaggggagattcacgataagcagggataacgccaagaactccctgtatctgcagatgaatagtctccgtgctgaggacactgccgtgtactattgcgtgagggatggcgtcgaaacaaccttctactactactactatggcatggacgtttggggacagggaacaactgtaaccgtgagctcaggaggtggaggtagcggaggtggaggtagtggtggaggtggctcggatatccagatgacacaaagcccaagctcgctgagcgctagcgtaggcgatcgagtgacattcacctgtagggctagccaggatattagacgggacctagggtggtaccagcagaaacctggcaaagctcccaaacgccttatctatgcggcttcacggctgcaatcgggagtcccctctcgcttttctggaagtgggagcggaaccgagtttacattgacgattagctccctccaacctgaggactttgcaacctattactgcctccagcacaataactatccacggaccttcggacaagggaccgaggtcgagatcatctccggaggtggtggatccgaggtgcagctggtcgagtctggaggaggattggtgcagcctggagggtcattgaaactctcatgtgcagcctctggattcaccttcaataagtacgccatgaactgggtccgccaggctccaggaaagggtttggaatgggttgctcgcataagaagtaaatataataattatgcaacatattatgccgattcagtgaaagacaggttcaccatctccagagatgattcaaaaaacactgcctatctacaaatgaacaacttgaagactgaggacactgccgtgtactactgtgtgagacatgggaacttcggtaatagctacatatcctactgggcttactggggccaagggactctggtcaccgtctcctcaggtggtggtggttctggcggcggcggctccggtggtggtggttctcagactgttgtgactcaggaaccttcactcaccgtatcacctggtggaacagtcacactcacttgtggctcctcgactggggctgttacatctggcaactacccaaactgggtccaacaaaaaccaggtcaggcaccccgtggtctaataggtgggactaagttcctcgcccccggtactcctgccagattctcaggctccctgcttggaggcaaggctgccctcaccctctcaggggtacagccagaggatgaggcagaatattactgtgttctatggtacagcaaccgctgggtgttcggtggaggaaccaaactgactgtccta

SEQ ID NO: 2155 - protein, 125 aa, Artificial Sequence
  IGF1R19-H
EVQLLESGGGLVQPGGSLRLSCAASGFTFSSYAMSWVRQAPGKGLEWVSAISGSGGITYYADSVKGRFTISRDNSKNTLYLQMNSLRAEDTAVYYCAKDLGYGDFYYYYYGMDVWGQGTTVTVSS

SEQ ID NO: 2156 - protein, 5 aa, Artificial Sequence
  IGF1R19-HCDR1
SYAMS

SEQ ID NO: 2157 - protein, 17 aa, Artificial Sequence
  IGF1R19-HCDR2
AISGSGGITYYADSVKG

SEQ ID NO: 2158 - protein, 16 aa, Artificial Sequence
  IGF1R19-HCDR3
DLGYGDFYYYYYGMDV

SEQ ID NO: 2159 - DNA, 375 bp, Artificial Sequence
  IGF1R19-H
gaggttcagctgcttgaatctggcggaggtttggttcagcctgggggttcacttcgtctgagctgtgctgccagcgggtttacattctcctcatatgccatgtcctgggtgcgacaggcaccaggcaaaggcttggaatgggtgtccgctattagcggaagcggaggcatcacatactacgctgatagcgtcaaggggagattcaccatctcacgggacaattccaagaacaccctgtatctccagatgaactccctgcgtgccgaagatactgccgtgtactattgcgccaaggatcttggctacggggacttctactactactactatgggatggacgtgtggggacagggaacaaccgtgactgtgagctct

SEQ ID NO: 2160 - protein, 107 aa, Artificial Sequence
  IGF1R19-L
DIQMTQSPSSLSASVGDRVTITCRASQGIRSDLGWFQQKPGKAPKRLIYAASKLHRGVPSRFSGSGSGTEFTLTISRLQPEDFATYYCLQHNSYPLTFGGGTKVEIK

SEQ ID NO: 2161 - protein, 11 aa, Artificial Sequence
  IGF1R19-LCDR1
RASQGIRSDLG

SEQ ID NO: 2162 - protein, 7 aa, Artificial Sequence
  IGF1R19-LCDR2
AASKLHR

SEQ ID NO: 2163 - protein, 9 aa, Artificial Sequence
  IGF1R19-LCDR3
LQHNSYPLT

SEQ ID NO: 2164 - DNA, 321 bp, Artificial Sequence
  IGF1R19-L
gacattcagatgactcagagcccaagctctctgtctgcttctgtgggagaccgcgttaccatcacctgtagagcaagccagggcattcgatccgatctcggatggtttcagcagaaacctggcaaggcacccaaacggctgatctatgctgccagcaaactgcataggggagtgccctcacgctttagcggatctggtagtggtaccgagttcacactgacaatctcacggctgcagcctgaggatttcgccacctattactgcctccagcacaattcctacccactgacctttggcggtgggactaaggtcgagatcaag

SEQ ID NO: 2165 - protein, 247 aa, Artificial Sequence
  IGF1R19-HL
EVQLLESGGGLVQPGGSLRLSCAASGFTFSSYAMSWVRQAPGKGLEWVSAISGSGGITYYADSVKGRFTISRDNSKNTLYLQMNSLRAEDTAVYYCAKDLGYGDFYYYYYGMDVWGQGTTVTVSSGGGGSGGGGSGGGGSDIQMTQSPSSLSASVGDRVTITCRASQGIRSDLGWFQQKPGKAPKRLIYAASKLHRGVPSRFSGSGSGTEFTLTISRLQPEDFATYYCLQHNSYPLTFGGGTKVEIK

SEQ ID NO: 2166 - DNA, 741 bp, Artificial Sequence
  IGF1R19-HL
gaggttcagctgcttgaatctggcggaggtttggttcagcctgggggttcacttcgtctgagctgtgctgccagcgggtttacattctcctcatatgccatgtcctgggtgcgacaggcaccaggcaaaggcttggaatgggtgtccgctattagcggaagcggaggcatcacatactacgctgatagcgtcaaggggagattcaccatctcacgggacaattccaagaacaccctgtatctccagatgaactccctgcgtgccgaagatactgccgtgtactattgcgccaaggatcttggctacggggacttctactactactactatgggatggacgtgtggggacagggaacaaccgtgactgtgagctctggtggcggaggatctggcggaggtggaagcggagggggagggagcgacattcagatgactcagagcccaagctctctgtctgcttctgtgggagaccgcgttaccatcacctgtagagcaagccagggcattcgatccgatctcggatggtttcagcagaaacctggcaaggcacccaaacggctgatctatgctgccagcaaactgcataggggagtgccctcacgctttagcggatctggtagtggtaccgagttcacactgacaatctcacggctgcagcctgaggatttcgccacctattactgcctccagcacaattcctacccactgacctttggcggtgggactaaggtcgagatcaag

SEQ ID NO: 2167 - protein, 502 aa, Artificial Sequence
  IGF1R19HLxI2CHL
EVQLLESGGGLVQPGGSLRLSCAASGFTFSSYAMSWVRQAPGKGLEWVSAISGSGGITYYADSVKGRFTISRDNSKNTLYLQMNSLRAEDTAVYYCAKDLGYGDFYYYYYGMDVWGQGTTVTVSSGGGGSGGGGSGGGGSDIQMTQSPSSLSASVGDRVTITCRASQGIRSDLGWFQQKPGKAPKRLIYAASKLHRGVPSRFSGSGSGTEFTLTISRLQPEDFATYYCLQHNSYPLTFGGGTKVEIKSGGGGSEVQLVESGGGLVQPGGSLKLSCAASGFTFNKYAMNWVRQAPGKGLEWVARIRSKYNNYATYYADSVKDRFTISRDDSKNTAYLQMNNLKTEDTAVYYCVRHGNFGNSYISYWAYWGQGTLVTVSSGGGGSGGGGSGGGGSQTVVTQEPSLTVSPGGTVTLTCGSSTGAVTSGNYPNWVQQKPGQAPRGLIGGTKFLAPGTPARFSGSLLGGKAALTLSGVQPEDEAEYYCVLWYSNRWVFGGGTKLTVL

SEQ ID NO: 2168 - DNA, 1506 bp, Artificial Sequence
  IGF1R19HLxI2CHL
gaggttcagctgcttgaatctggcggaggtttggttcagcctgggggttcacttcgtctgagctgtgctgccagcgggtttacattctcctcatatgccatgtcctgggtgcgacaggcaccaggcaaaggcttggaatgggtgtccgctattagcggaagcggaggcatcacatactacgctgatagcgtcaaggggagattcaccatctcacgggacaattccaagaacaccctgtatctccagatgaactccctgcgtgccgaagatactgccgtgtactattgcgccaaggatcttggctacggggacttctactactactactatgggatggacgtgtggggacagggaacaaccgtgactgtgagctctggtggcggaggatctggcggaggtggaagcggagggggagggagcgacattcagatgactcagagcccaagctctctgtctgcttctgtgggagaccgcgttaccatcacctgtagagcaagccagggcattcgatccgatctcggatggtttcagcagaaacctggcaaggcacccaaacggctgatctatgctgccagcaaactgcataggggagtgccctcacgctttagcggatctggtagtggtaccgagttcacactgacaatctcacggctgcagcctgaggatttcgccacctattactgcctccagcacaattcctacccactgacctttggcggtgggactaaggtcgagatcaagtccggaggtggtggatccgaggtgcagctggtcgagtctggaggaggattggtgcagcctggagggtcattgaaactctcatgtgcagcctctggattcaccttcaataagtacgccatgaactgggtccgccaggctccaggaaagggtttggaatgggttgctcgcataagaagtaaatataataattatgcaacatattatgccgattcagtgaaagacaggttcaccatctccagagatgattcaaaaaacactgcctatctacaaatgaacaacttgaagactgaggacactgccgtgtactactgtgtgagacatgggaacttcggtaatagctacatatcctactgggcttactggggccaagggactctggtcaccgtctcctcaggtggtggtggttctggcggcggcggctccggtggtggtggttctcagactgttgtgactcaggaaccttcactcaccgtatcacctggtggaacagtcacactcacttgtggctcctcgactggggctgttacatctggcaactacccaaactgggtccaacaaaaaccaggtcaggcaccccgtggtctaataggtgggactaagttcctcgcccccggtactcctgccagattctcaggctccctgcttggaggcaaggctgccctcaccctctcaggggtacagccagaggatgaggcagaatattactgtgttctatggtacagcaaccgctgggtgttcggtggaggaaccaaactgactgtccta

SEQ ID NO: 2169 - protein, 121 aa, Artificial Sequence
  IGF1R20-H
QIQLVQSGPELKKPGETVKISCKASGYNLANYGLNWVKQAPGEGLKWMGWINTNTGAPTYAEEFKGRFVFFLETSASTAYLQINNLSDEDTATYFCARSIYYYASRYFNVWGAGTSVTVSS

SEQ ID NO: 2170 - protein, 13 aa, Artificial Sequence
  IGF1R20-HCDR1
KASGYNLANYGLN

SEQ ID NO: 2171 - protein, 17 aa, Artificial Sequence
  IGF1R20-HCDR2
WINTNTGAPTYAEEFKG

SEQ ID NO: 2172 - protein, 12 aa, Artificial Sequence
  IGF1R20-HCDR3
SIYYYASRYFNV

SEQ ID NO: 2173 - DNA, 363 bp, Artificial Sequence
  IGF1R20-H
cagatccagctggtgcagagcggacctgagcttaagaagcctggcgagaccgtcaagatctcatgcaaagctagcggatacaacctggccaactatggcctcaactgggtgaaacaggcccctggagagggcctgaagtggatgggatggatcaacaccaatactggcgccccaacatacgcagaggaatttaaggggaggttcgtgttcttcctggaaacctccgctagtactgcctacctgcagatcaacaacctctccgatgaagataccgccacctacttttgtgcccgctctatctactactacgcatccaggtacttcaatgtctggggagccggaacctccgtgactgttagctct

SEQ ID NO: 2174 - protein, 107 aa, Artificial Sequence
  IGF1R20-L
DIQMTQTTSSLSASLGDKVTISCRASQDISNYLNWYQQKPDGTIKLLIYYTSRLHSGIPSRFSGSGSGTDYSLTISNLEQEDIATYFCQQGNTLPWTFGGGTKVEIK

SEQ ID NO: 2175 - protein, 11 aa, Artificial Sequence
  IGF1R20-LCDR1
RASQDISNYLN

SEQ ID NO: 2176 - protein, 7 aa, Artificial Sequence
  IGF1R20-LCDR2
YTSRLHS

SEQ ID NO: 2177 - protein, 9 aa, Artificial Sequence
  IGF1R20-LCDR3
QQGNTLPWT

SEQ ID NO: 2178 - DNA, 321 bp, Artificial Sequence
  IGF1R20-L
gatatccagatgacacagactacatcttccctctccgcttcacttggcgacaaagtcaccatttcatgccgtgcaagccaggacatcagcaactacctcaattggtaccagcagaaacccgacgggacaatcaagctgctgatctactacacaagccgactgcacagcgggattccatcaagattcagcggaagcggaagtgggaccgattacagcttgacaatcagcaatctggagcaggaggacatcgctacttacttttgccagcaggggaataccttgccatggacatttgggggcggtaccaaagtggaaatcaag

SEQ ID NO: 2179 - protein, 243 aa, Artificial Sequence
  IGF1R20-HL
QIQLVQSGPELKKPGETVKISCKASGYNLANYGLNWVKQAPGEGLKWMGWINTNTGAPTYAEEFKGRFVFFLETSASTAYLQINNLSDEDTATYFCARSIYYYASRYFNVWGAGTSVTVSSGGGGSGGGGSGGGGSDIQMTQTTSSLSASLGDKVTISCRASQDISNYLNWYQQKPDGTIKLLIYYTSRLHSGIPSRFSGSGSGTDYSLTISNLEQEDIATYFCQQGNTLPWTFGGGTKVEIK

SEQ ID NO: 2180 - DNA, 729 bp, Artificial Sequence
  IGF1R20-HL
cagatccagctggtgcagagcggacctgagcttaagaagcctggcgagaccgtcaagatctcatgcaaagctagcggatacaacctggccaactatggcctcaactgggtgaaacaggcccctggagagggcctgaagtggatgggatggatcaacaccaatactggcgccccaacatacgcagaggaatttaaggggaggttcgtgttcttcctggaaacctccgctagtactgcctacctgcagatcaacaacctctccgatgaagataccgccacctacttttgtgcccgctctatctactactacgcatccaggtacttcaatgtctggggagccggaacctccgtgactgttagctctggaggaggcggtagcggtggcggtggaagtggcggaggtggctctgatatccagatgacacagactacatcttccctctccgcttcacttggcgacaaagtcaccatttcatgccgtgcaagccaggacatcagcaactacctcaattggtaccagcagaaacccgacgggacaatcaagctgctgatctactacacaagccgactgcacagcgggattccatcaagattcagcggaagcggaagtgggaccgattacagcttgacaatcagcaatctggagcaggaggacatcgctacttacttttgccagcaggggaataccttgccatggacatttgggggcggtaccaaagtggaaatcaag

SEQ ID NO: 2181 - protein, 498 aa, Artificial Sequence
  IGF1R20HLxI2CHL
QIQLVQSGPELKKPGETVKISCKASGYNLANYGLNWVKQAPGEGLKWMGWINTNTGAPTYAEEFKGRFVFFLETSASTAYLQINNLSDEDTATYFCARSIYYYASRYFNVWGAGTSVTVSSGGGGSGGGGSGGGGSDIQMTQTTSSLSASLGDKVTISCRASQDISNYLNWYQQKPDGTIKLLIYYTSRLHSGIPSRFSGSGSGTDYSLTISNLEQEDIATYFCQQGNTLPWTFGGGTKVEIKSGGGGSEVQLVESGGGLVQPGGSLKLSCAASGFTFNKYAMNWVRQAPGKGLEWVARIRSKYNNYATYYADSVKDRFTISRDDSKNTAYLQMNNLKTEDTAVYYCVRHGNFGNSYISYWAYWGQGTLVTVSSGGGGSGGGGSGGGGSQTVVTQEPSLTVSPGGTVTLTCGSSTGAVTSGNYPNWVQQKPGQAPRGLIGGTKFLAPGTPARFSGSLLGGKAALTLSGVQPEDEAEYYCVLWYSNRWVFGGGTKLTVL

SEQ ID NO: 2182 - DNA, 1494 bp, Artificial Sequence
  IGF1R20HLxI2CHL
cagatccagctggtgcagagcggacctgagcttaagaagcctggcgagaccgtcaagatctcatgcaaagctagcggatacaacctggccaactatggcctcaactgggtgaaacaggcccctggagagggcctgaagtggatgggatggatcaacaccaatactggcgccccaacatacgcagaggaatttaaggggaggttcgtgttcttcctggaaacctccgctagtactgcctacctgcagatcaacaacctctccgatgaagataccgccacctacttttgtgcccgctctatctactactacgcatccaggtacttcaatgtctggggagccggaacctccgtgactgttagctctggaggaggcggtagcggtggcggtggaagtggcggaggtggctctgatatccagatgacacagactacatcttccctctccgcttcacttggcgacaaagtcaccatttcatgccgtgcaagccaggacatcagcaactacctcaattggtaccagcagaaacccgacgggacaatcaagctgctgatctactacacaagccgactgcacagcgggattccatcaagattcagcggaagcggaagtgggaccgattacagcttgacaatcagcaatctggagcaggaggacatcgctacttacttttgccagcaggggaataccttgccatggacatttgggggcggtaccaaagtggaaatcaagtccggaggtggtggatccgaggtgcagctggtcgagtctggaggaggattggtgcagcctggagggtcattgaaactctcatgtgcagcctctggattcaccttcaataagtacgccatgaactgggtccgccaggctccaggaaagggtttggaatgggttgctcgcataagaagtaaatataataattatgcaacatattatgccgattcagtgaaagacaggttcaccatctccagagatgattcaaaaaacactgcctatctacaaatgaacaacttgaagactgaggacactgccgtgtactactgtgtgagacatgggaacttcggtaatagctacatatcctactgggcttactggggccaagggactctggtcaccgtctcctcaggtggtggtggttctggcggcggcggctccggtggtggtggttctcagactgttgtgactcaggaaccttcactcaccgtatcacctggtggaacagtcacactcacttgtggctcctcgactggggctgttacatctggcaactacccaaactgggtccaacaaaaaccaggtcaggcaccccgtggtctaataggtgggactaagttcctcgcccccggtactcctgccagattctcaggctccctgcttggaggcaaggctgccctcaccctctcaggggtacagccagaggatgaggcagaatattactgtgttctatggtacagcaaccgctgggtgttcggtggaggaaccaaactgactgtccta

SEQ ID NO: 2183 - protein, 121 aa, Artificial Sequence
  IGF1R21-H
QIQLVQSGPELKKPGETVKISCKASGYTLANYGMNWVKQAPGKGFKWMGWINTNTGKPTYSDEFKGRFVFSLETSASTAYLLINNLSNEDTATYFCARSIYYYGSRYFNVWGAGTTVTVSS

SEQ ID NO: 2184 - protein, 13 aa, Artificial Sequence
  IGF1R21-HCDR1
KASGYTLANYGMN

SEQ ID NO: 2185 - protein, 17 aa, Artificial Sequence
  IGF1R21-HCDR2
WINTNTGKPTYSDEFKG

SEQ ID NO: 2186 - protein, 12 aa, Artificial Sequence
  IGF1R21-HCDR3
SIYYYGSRYFNV

SEQ ID NO: 2187 - DNA, 363 bp, Artificial Sequence
  IGF1R21-H
cagatccagcttgtccagagtggtcccgagctgaagaaacctggcgaaaccgtgaaaatcagctgcaaggcaagcggctatacactggccaactatggcatgaattgggtgaagcaggcacctgggaagggtttcaagtggatgggctggatcaacaccaacactggcaaaccaacctattccgacgagttcaaggggcgtttcgtgttttcactggaaacctccgcatcaaccgcttacctcttgatcaacaacctgagcaacgaggacaccgccacatacttctgcgctaggagcatctactactatgggagccgctacttcaatgtgtggggagctgggacaactgttactgtgagctca

SEQ ID NO: 2188 - protein, 107 aa, Artificial Sequence
  IGF1R21-L
DIQMTQSTSSLSASLGDRVTISCRASQDINNYLTWYQQKPDGTVKLLIYYTSRLHSGVPSRFSGSGSGTDYSLTITNLEQEDFATYFCQQGNTLPWTFGEGTKVEIK

SEQ ID NO: 2189 - protein, 11 aa, Artificial Sequence
  IGF1R21-LCDR1
RASQDINNYLT

SEQ ID NO: 2190 - protein, 7 aa, Artificial Sequence
  IGF1R21-LCDR2
YTSRLHS

SEQ ID NO: 2191 - protein, 9 aa, Artificial Sequence
  IGF1R21-LCDR3
QQGNTLPWT

SEQ ID NO: 2192 - DNA, 321 bp, Artificial Sequence
  IGF1R21-L
gatatccagatgacacagagcacaagttcattgtccgcctctcttggcgatcgagtgaccattagctgccgagcaagccaggacattaacaactacctgacctggtatcagcagaaacccgacgggactgtgaagctgctgatctattacacctctagactgcacagtggcgttcctagccggtttagcggatccggtagcggaacagattactccctgaccatcaccaatctcgagcaggaagactttgccacctacttttgccagcagggcaatactctcccatggacatttggtgaggggaccaaagtcgagattaag

SEQ ID NO: 2193 - protein, 243 aa, Artificial Sequence
  IGF1R21-HL
QIQLVQSGPELKKPGETVKISCKASGYTLANYGMNWVKQAPGKGFKWMGWINTNTGKPTYSDEFKGRFVFSLETSASTAYLLINNLSNEDTATYFCARSIYYYGSRYFNVWGAGTTVTVSSGGGGSGGGGSGGGGSDIQMTQSTSSLSASLGDRVTISCRASQDINNYLTWYQQKPDGTVKLLIYYTSRLHSGVPSRFSGSGSGTDYSLTITNLEQEDFATYFCQQGNTLPWTFGEGTKVEIK

SEQ ID NO: 2194 - DNA, 729 bp, Artificial Sequence
  IGF1R21-HL
cagatccagcttgtccagagtggtcccgagctgaagaaacctggcgaaaccgtgaaaatcagctgcaaggcaagcggctatacactggccaactatggcatgaattgggtgaagcaggcacctgggaagggtttcaagtggatgggctggatcaacaccaacactggcaaaccaacctattccgacgagttcaaggggcgtttcgtgttttcactggaaacctccgcatcaaccgcttacctcttgatcaacaacctgagcaacgaggacaccgccacatacttctgcgctaggagcatctactactatgggagccgctacttcaatgtgtggggagctgggacaactgttactgtgagctcaggagggggaggtagcggaggaggcggtagcggaggcggtggatccgatatccagatgacacagagcacaagttcattgtccgcctctcttggcgatcgagtgaccattagctgccgagcaagccaggacattaacaactacctgacctggtatcagcagaaacccgacgggactgtgaagctgctgatctattacacctctagactgcacagtggcgttcctagccggtttagcggatccggtagcggaacagattactccctgaccatcaccaatctcgagcaggaagactttgccacctacttttgccagcagggcaatactctcccatggacatttggtgaggggaccaaagtcgagattaag

SEQ ID NO: 2195 - protein, 498 aa, Artificial Sequence
  IGF1R21HLxI2CHL
QIQLVQSGPELKKPGETVKISCKASGYTLANYGMNWVKQAPGKGFKWMGWINTNTGKPTYSDEFKGRFVFSLETSASTAYLLINNLSNEDTATYFCARSIYYYGSRYFNVWGAGTTVTVSSGGGGSGGGGSGGGGSDIQMTQSTSSLSASLGDRVTISCRASQDINNYLTWYQQKPDGTVKLLIYYTSRLHSGVPSRFSGSGSGTDYSLTITNLEQEDFATYFCQQGNTLPWTFGEGTKVEIKSGGGGSEVQLVESGGGLVQPGGSLKLSCAASGFTFNKYAMNWVRQAPGKGLEWVARIRSKYNNYATYYADSVKDRFTISRDDSKNTAYLQMNNLKTEDTAVYYCVRHGNFGNSYISYWAYWGQGTLVTVSSGGGGSGGGGSGGGGSQTVVTQEPSLTVSPGGTVTLTCGSSTGAVTSGNYPNWVQQKPGQAPRGLIGGTKFLAPGTPARFSGSLLGGKAALTLSGVQPEDEAEYYCVLWYSNRWVFGGGTKLTVL

SEQ ID NO: 2196 - DNA, 1494 bp, Artificial Sequence
  IGF1R21HLxI2CHL
cagatccagcttgtccagagtggtcccgagctgaagaaacctggcgaaaccgtgaaaatcagctgcaaggcaagcggctatacactggccaactatggcatgaattgggtgaagcaggcacctgggaagggtttcaagtggatgggctggatcaacaccaacactggcaaaccaacctattccgacgagttcaaggggcgtttcgtgttttcactggaaacctccgcatcaaccgcttacctcttgatcaacaacctgagcaacgaggacaccgccacatacttctgcgctaggagcatctactactatgggagccgctacttcaatgtgtggggagctgggacaactgttactgtgagctcaggagggggaggtagcggaggaggcggtagcggaggcggtggatccgatatccagatgacacagagcacaagttcattgtccgcctctcttggcgatcgagtgaccattagctgccgagcaagccaggacattaacaactacctgacctggtatcagcagaaacccgacgggactgtgaagctgctgatctattacacctctagactgcacagtggcgttcctagccggtttagcggatccggtagcggaacagattactccctgaccatcaccaatctcgagcaggaagactttgccacctacttttgccagcagggcaatactctcccatggacatttggtgaggggaccaaagtcgagattaagtccggaggtggtggatccgaggtgcagctggtcgagtctggaggaggattggtgcagcctggagggtcattgaaactctcatgtgcagcctctggattcaccttcaataagtacgccatgaactgggtccgccaggctccaggaaagggtttggaatgggttgctcgcataagaagtaaatataataattatgcaacatattatgccgattcagtgaaagacaggttcaccatctccagagatgattcaaaaaacactgcctatctacaaatgaacaacttgaagactgaggacactgccgtgtactactgtgtgagacatgggaacttcggtaatagctacatatcctactgggcttactggggccaagggactctggtcaccgtctcctcaggtggtggtggttctggcggcggcggctccggtggtggtggttctcagactgttgtgactcaggaaccttcactcaccgtatcacctggtggaacagtcacactcacttgtggctcctcgactggggctgttacatctggcaactacccaaactgggtccaacaaaaaccaggtcaggcaccccgtggtctaataggtgggactaagttcctcgcccccggtactcctgccagattctcaggctccctgcttggaggcaaggctgccctcaccctctcaggggtacagccagaggatgaggcagaatattactgtgttctatggtacagcaaccgctgggtgttcggtggaggaaccaaactgactgtccta

SEQ ID NO: 2197 - protein, 115 aa, Artificial Sequence
  IGF1R23-H
EVQLVESGGGLVQPGGSLRLSCAASGYTFTRFWIHWVRQAPGKGLEWVGEINPSNGRTNYNENFKNRFTISADTSKNTAYLQMNSLRAEDTAVYYCARGGRLDQWGQGTLVTVSS

SEQ ID NO: 2198 - protein, 5 aa, Artificial Sequence
  IGF1R23-HCDR1
RFWIH

SEQ ID NO: 2199 - protein, 17 aa, Artificial Sequence
  IGF1R23-HCDR2
EINPSNGRTNYNENFKN

SEQ ID NO: 2200 - protein, 6 aa, Artificial Sequence
  IGF1R23-HCDR3
GGRLDQ

SEQ ID NO: 2201 - DNA, 345 bp, Artificial Sequence
  IGF1R23-H
gaagtccagcttgttgaaagcggaggcggtctggttcagcctggtggatctctgagactgagctgcgctgcaagcggctacacattcacacgcttttggattcattgggtgaggcaggcccctggaaaaggactcgaatgggtgggcgagatcaatcctagcaacggtcggaccaactacaacgagaacttcaagaaccggttcaccatctctgccgacacctccaagaataccgcatacctgcagatgaatagcctccgagccgaggacactgccgtctattactgtgctaggggaggacgccttgatcagtggggacaggggacacttgtgactgtgtcatcc

SEQ ID NO: 2202 - protein, 107 aa, Artificial Sequence
  IGF1R23-L
DIQMTQSPSSLSASVGDRVTITCKASQNLRSKVAWYQQKPGKAPKLLIYSASYRYSGVPSRFSGSGSGTDFTLTISSLQPEDFATYYCQQYSNYPYTFGQGTKVEIK

SEQ ID NO: 2203 - protein, 11 aa, Artificial Sequence
  IGF1R23-LCDR1
KASQNLRSKVA

SEQ ID NO: 2204 - protein, 7 aa, Artificial Sequence
  IGF1R23-LCDR2
SASYRYS

SEQ ID NO: 2205 - protein, 9 aa, Artificial Sequence
  IGF1R23-LCDR3
QQYSNYPYT

SEQ ID NO: 2206 - DNA, 321 bp, Artificial Sequence
  IGF1R23-L
gatattcagatgacccagagcccaagctccttgagcgctagcgttggcgatcgtgtgactatcacctgtaaggctagccagaacctgcgaagcaaggtcgcatggtatcagcagaaacccggcaaagccccaaagctgctgatctactccgcatcctatcggtattccggcgtgccaagcagattcagtgggagtgggagcggaactgactttaccctcaccatctcatccctgcagcctgaggactttgccacctactattgccagcagtattccaactacccctacacctttggccagggcacaaaagtggagatcaag

SEQ ID NO: 2207 - protein, 237 aa, Artificial Sequence
  IGF1R23-HL
EVQLVESGGGLVQPGGSLRLSCAASGYTFTRFWIHWVRQAPGKGLEWVGEINPSNGRTNYNENFKNRFTISADTSKNTAYLQMNSLRAEDTAVYYCARGGRLDQWGQGTLVTVSSGGGGSGGGGSGGGGSDIQMTQSPSSLSASVGDRVTITCKASQNLRSKVAWYQQKPGKAPKLLIYSASYRYSGVPSRFSGSGSGTDFTLTISSLQPEDFATYYCQQYSNYPYTFGQGTKVEIK

SEQ ID NO: 2208 - DNA, 711 bp, Artificial Sequence
  IGF1R23-HL
gaagtccagcttgttgaaagcggaggcggtctggttcagcctggtggatctctgagactgagctgcgctgcaagcggctacacattcacacgcttttggattcattgggtgaggcaggcccctggaaaaggactcgaatgggtgggcgagatcaatcctagcaacggtcggaccaactacaacgagaacttcaagaaccggttcaccatctctgccgacacctccaagaataccgcatacctgcagatgaatagcctccgagccgaggacactgccgtctattactgtgctaggggaggacgccttgatcagtggggacaggggacacttgtgactgtgtcatccggtgggggaggtagtgggggaggtggaagcggcggaggaggcagcgatattcagatgacccagagcccaagctccttgagcgctagcgttggcgatcgtgtgactatcacctgtaaggctagccagaacctgcgaagcaaggtcgcatggtatcagcagaaacccggcaaagccccaaagctgctgatctactccgcatcctatcggtattccggcgtgccaagcagattcagtgggagtgggagcggaactgactttaccctcaccatctcatccctgcagcctgaggactttgccacctactattgccagcagtattccaactacccctacacctttggccagggcacaaaagtggagatcaag

SEQ ID NO: 2209 - protein, 492 aa, Artificial Sequence
  IGF1R23HLxI2CHL
EVQLVESGGGLVQPGGSLRLSCAASGYTFTRFWIHWVRQAPGKGLEWVGEINPSNGRTNYNENFKNRFTISADTSKNTAYLQMNSLRAEDTAVYYCARGGRLDQWGQGTLVTVSSGGGGSGGGGSGGGGSDIQMTQSPSSLSASVGDRVTITCKASQNLRSKVAWYQQKPGKAPKLLIYSASYRYSGVPSRFSGSGSGTDFTLTISSLQPEDFATYYCQQYSNYPYTFGQGTKVEIKSGGGGSEVQLVESGGGLVQPGGSLKLSCAASGFTFNKYAMNWVRQAPGKGLEWVARIRSKYNNYATYYADSVKDRFTISRDDSKNTAYLQMNNLKTEDTAVYYCVRHGNFGNSYISYWAYWGQGTLVTVSSGGGGSGGGGSGGGGSQTVVTQEPSLTVSPGGTVTLTCGSSTGAVTSGNYPNWVQQKPGQAPRGLIGGTKFLAPGTPARFSGSLLGGKAALTLSGVQPEDEAEYYCVLWYSNRWVFGGGTKLTVL

SEQ ID NO: 2210 - DNA, 1476 bp, Artificial Sequence
  IGF1R23HLxI2CHL
gaagtccagcttgttgaaagcggaggcggtctggttcagcctggtggatctctgagactgagctgcgctgcaagcggctacacattcacacgcttttggattcattgggtgaggcaggcccctggaaaaggactcgaatgggtgggcgagatcaatcctagcaacggtcggaccaactacaacgagaacttcaagaaccggttcaccatctctgccgacacctccaagaataccgcatacctgcagatgaatagcctccgagccgaggacactgccgtctattactgtgctaggggaggacgccttgatcagtggggacaggggacacttgtgactgtgtcatccggtgggggaggtagtgggggaggtggaagcggcggaggaggcagcgatattcagatgacccagagcccaagctccttgagcgctagcgttggcgatcgtgtgactatcacctgtaaggctagccagaacctgcgaagcaaggtcgcatggtatcagcagaaacccggcaaagccccaaagctgctgatctactccgcatcctatcggtattccggcgtgccaagcagattcagtgggagtgggagcggaactgactttaccctcaccatctcatccctgcagcctgaggactttgccacctactattgccagcagtattccaactacccctacacctttggccagggcacaaaagtggagatcaagtccggaggtggtggatccgaggtgcagctggtcgagtctggaggaggattggtgcagcctggagggtcattgaaactctcatgtgcagcctctggattcaccttcaataagtacgccatgaactgggtccgccaggctccaggaaagggtttggaatgggttgctcgcataagaagtaaatataataattatgcaacatattatgccgattcagtgaaagacaggttcaccatctccagagatgattcaaaaaacactgcctatctacaaatgaacaacttgaagactgaggacactgccgtgtactactgtgtgagacatgggaacttcggtaatagctacatatcctactgggcttactggggccaagggactctggtcaccgtctcctcaggtggtggtggttctggcggcggcggctccggtggtggtggttctcagactgttgtgactcaggaaccttcactcaccgtatcacctggtggaacagtcacactcacttgtggctcctcgactggggctgttacatctggcaactacccaaactgggtccaacaaaaaccaggtcaggcaccccgtggtctaataggtgggactaagttcctcgcccccggtactcctgccagattctcaggctccctgcttggaggcaaggctgccctcaccctctcaggggtacagccagaggatgaggcagaatattactgtgttctatggtacagcaaccgctgggtgttcggtggaggaaccaaactgactgtccta

SEQ ID NO: 2211 - protein, 120 aa, Artificial Sequence
  IGF1R24-H
EVQLVESGGELVQPGGSLRLSCAASGFTFSSYAMSWVRQAPGKGLEWVSRISPSGGSTYYADSVKGRFTISADTSKNTAYLQMNSLRAEDTAVYYCAREEYYYWGAMDVWGQGTLVTVSS

SEQ ID NO: 2212 - protein, 5 aa, Artificial Sequence
  IGF1R24-HCDR1
SYAMS

SEQ ID NO: 2213 - protein, 17 aa, Artificial Sequence
  IGF1R24-HCDR2
RISPSGGSTYYADSVKG

SEQ ID NO: 2214 - protein, 11 aa, Artificial Sequence
  IGF1R24-HCDR3
EEYYYWGAMDV

SEQ ID NO: 2215 - DNA, 360 bp, Artificial Sequence
  IGF1R24-H
gaagttcagctggtggaatccgggggagagcttgttcagcctggcggatcacttaggctgtcctgtgctgcaagcggcttcaccttctctagctatgccatgtcatgggtgcgacaggcccctggaaaaggactggagtgggtctcacgtatctctccaagtggcggatccacatactacgccgatagcgtgaaagggaggtttaccatttccgctgacacctccaagaacaccgcctacctgcagatgaactcactgagagccgaagacactgccgtgtactattgcgcacgggaggagtactactattggggagctatggacgtgtggggacagggaacattggtgactgtgtcttcc

SEQ ID NO: 2216 - protein, 107 aa, Artificial Sequence
  IGF1R24-L
DIQMTQSPSSLSASVGDRVTITCRASQSISSYLAWYQQKPGKAPKLLIYGASSRASGVPSRFSGSGSGTDFTLTISSLQPEDFATYYCQQYYSSPLTFGQGTKVEIK

SEQ ID NO: 2217 - protein, 11 aa, Artificial Sequence
  IGF1R24-LCDR1
RASQSISSYLA

SEQ ID NO: 2218 - protein, 7 aa, Artificial Sequence
  IGF1R24-LCDR2
GASSRAS

SEQ ID NO: 2219 - protein, 9 aa, Artificial Sequence
  IGF1R24-LCDR3
QQYYSSPLT

SEQ ID NO: 2220 - DNA, 321 bp, Artificial Sequence
  IGF1R24-L
gatatccagatgacacagagcccaagctcactgagcgctagcgtcggagatagagtcaccatcacctgtagggcaagccagagcatctctagctacctggcatggtaccagcagaaacctggcaaggctcccaagctcctgatctacggcgcttcatctagagctagcggcgttccctcacgatttagcggaagcggaagcggaactgacttcaccctgaccatttcaagcctccagcctgaggatttcgccacctactactgccagcagtactactctagcccactcacatttgggcaggggacaaaggtggagatcaag

SEQ ID NO: 2221 - protein, 242 aa, Artificial Sequence
  IGF1R24-HL
EVQLVESGGELVQPGGSLRLSCAASGFTFSSYAMSWVRQAPGKGLEWVSRISPSGGSTYYADSVKGRFTISADTSKNTAYLQMNSLRAEDTAVYYCAREEYYYWGAMDVWGQGTLVTVSSGGGGSGGGGSGGGGSDIQMTQSPSSLSASVGDRVTITCRASQSISSYLAWYQQKPGKAPKLLIYGASSRASGVPSRFSGSGSGTDFTLTISSLQPEDFATYYCQQYYSSPLTFGQGTKVEIK

SEQ ID NO: 2222 - DNA, 726 bp, Artificial Sequence
  IGF1R24-HL
gaagttcagctggtggaatccgggggagagcttgttcagcctggcggatcacttaggctgtcctgtgctgcaagcggcttcaccttctctagctatgccatgtcatgggtgcgacaggcccctggaaaaggactggagtgggtctcacgtatctctccaagtggcggatccacatactacgccgatagcgtgaaagggaggtttaccatttccgctgacacctccaagaacaccgcctacctgcagatgaactcactgagagccgaagacactgccgtgtactattgcgcacgggaggagtactactattggggagctatggacgtgtggggacagggaacattggtgactgtgtcttccggtggcggaggaagcggaggtggcggaagcggaggcggtggaagcgatatccagatgacacagagcccaagctcactgagcgctagcgtcggagatagagtcaccatcacctgtagggcaagccagagcatctctagctacctggcatggtaccagcagaaacctggcaaggctcccaagctcctgatctacggcgcttcatctagagctagcggcgttccctcacgatttagcggaagcggaagcggaactgacttcaccctgaccatttcaagcctccagcctgaggatttcgccacctactactgccagcagtactactctagcccactcacatttgggcaggggacaaaggtggagatcaag

SEQ ID NO: 2223 - protein, 497 aa, Artificial Sequence
  IGF1R24HLxI2CHL
EVQLVESGGELVQPGGSLRLSCAASGFTFSSYAMSWVRQAPGKGLEWVSRISPSGGSTYYADSVKGRFTISADTSKNTAYLQMNSLRAEDTAVYYCAREEYYYWGAMDVWGQGTLVTVSSGGGGSGGGGSGGGGSDIQMTQSPSSLSASVGDRVTITCRASQSISSYLAWYQQKPGKAPKLLIYGASSRASGVPSRFSGSGSGTDFTLTISSLQPEDFATYYCQQYYSSPLTFGQGTKVEIKSGGGGSEVQLVESGGGLVQPGGSLKLSCAASGFTFNKYAMNWVRQAPGKGLEWVARIRSKYNNYATYYADSVKDRFTISRDDSKNTAYLQMNNLKTEDTAVYYCVRHGNFGNSYISYWAYWGQGTLVTVSSGGGGSGGGGSGGGGSQTVVTQEPSLTVSPGGTVTLTCGSSTGAVTSGNYPNWVQQKPGQAPRGLIGGTKFLAPGTPARFSGSLLGGKAALTLSGVQPEDEAEYYCVLWYSNRWVFGGGTKLTVL

SEQ ID NO: 2224 - DNA, 1491 bp, Artificial Sequence
  IGF1R24HLxI2CHL
gaagttcagctggtggaatccgggggagagcttgttcagcctggcggatcacttaggctgtcctgtgctgcaagcggcttcaccttctctagctatgccatgtcatgggtgcgacaggcccctggaaaaggactggagtgggtctcacgtatctctccaagtggcggatccacatactacgccgatagcgtgaaagggaggtttaccatttccgctgacacctccaagaacaccgcctacctgcagatgaactcactgagagccgaagacactgccgtgtactattgcgcacgggaggagtactactattggggagctatggacgtgtggggacagggaacattggtgactgtgtcttccggtggcggaggaagcggaggtggcggaagcggaggcggtggaagcgatatccagatgacacagagcccaagctcactgagcgctagcgtcggagatagagtcaccatcacctgtagggcaagccagagcatctctagctacctggcatggtaccagcagaaacctggcaaggctcccaagctcctgatctacggcgcttcatctagagctagcggcgttccctcacgatttagcggaagcggaagcggaactgacttcaccctgaccatttcaagcctccagcctgaggatttcgccacctactactgccagcagtactactctagcccactcacatttgggcaggggacaaaggtggagatcaagtccggaggtggtggatccgaggtgcagctggtcgagtctggaggaggattggtgcagcctggagggtcattgaaactctcatgtgcagcctctggattcaccttcaataagtacgccatgaactgggtccgccaggctccaggaaagggtttggaatgggttgctcgcataagaagtaaatataataattatgcaacatattatgccgattcagtgaaagacaggttcaccatctccagagatgattcaaaaaacactgcctatctacaaatgaacaacttgaagactgaggacactgccgtgtactactgtgtgagacatgggaacttcggtaatagctacatatcctactgggcttactggggccaagggactctggtcaccgtctcctcaggtggtggtggttctggcggcggcggctccggtggtggtggttctcagactgttgtgactcaggaaccttcactcaccgtatcacctggtggaacagtcacactcacttgtggctcctcgactggggctgttacatctggcaactacccaaactgggtccaacaaaaaccaggtcaggcaccccgtggtctaataggtgggactaagttcctcgcccccggtactcctgccagattctcaggctccctgcttggaggcaaggctgccctcaccctctcaggggtacagccagaggatgaggcagaatattactgtgttctatggtacagcaaccgctgggtgttcggtggaggaaccaaactgactgtccta

SEQ ID NO: 2225 - protein, 27 aa, Macaca fascicularis
  Macaca fascicularis CD3 epsilon FN18+ 1-27
QDGNEEMGSITQTPYQVSISGTTILTC

SEQ ID NO: 2226 - protein, 27 aa, Macaca fascicularis
  Macaca fascicularis CD3 epsilon FN18- 1-27
QDGNEEMGSITQTPYQVSISGTTVILT

SEQ ID NO: 2227 - protein, 27 aa, Macaca mulatta
  Macaca mulatta CD3 epsilon 1-27
QDGNEEMGSITQTPYHVSISGTTVILT
